United States Patent Application Publication US 2026/0191916 A1 - sequence listing, part 32

SEQ ID NO: 89 - DNA, 6334521 bp, Bacteroides thetaiotaomicron (residues 2,111,508-4,223,014 of 6,334,521)
  source 1..6334521: mol_type = genomic DNA
gtatgatagtattaactactatccgtatcctgaatatatagagcgtgggtatgataatgaactaagtacacgtgtggagaatttctatgatactcatactgctgatgtttctgtacgtggtattcaccctaagatgatgtatagtgtaggagtgggggtgactcctcagtcatccttaagtaaaacgacaattggtccgaactataagaagaatcttccagaacagaatgttttgaattgggctccttcagtaatgttccgttatatgtttaataaacaacatgtattaatgttccgttatcgtggaagaagcagtacacctaacattgaggacctgcaggaggtgattgatataaccgacccgatgaacctaagatatggtaatccgaatttgaaaccatcatttaataataattttactctcgattatagaaagtttgtaccggaatctatgcgtagctattctgctaatttgtattatacaagtacattgaattctgtagcaaatagaatgacatatgatcctcagacgggtgctcgggtttataagaaagaaaatgtaaatggtaactggcaagcaagaggatttttttcattcaatacaccgttgaagaacaagaaatttacaatttcatctaatacaaatgcacgatttagtgatgctgtaagttatacaagtgtcggaagttctaaaaatgcagatcaggaactaagtacaacgcataatttagggttaggagaacggtttaccagtagttatcgtagtgaagtttttgatatatccttaagtggttctgttaattataatttggtcagaaatagtaaacaagaaaatagtaatcgagaaacattcgactactatattggaggtaataccaatgtaaaccttccttggcaagtctcgatttccacagatattaattgtcgatttaaagatggatatacaggtgggcttaataataacgaagtgatgtggaatgcacaaatttcgaagaattttttaaagaataattcgggtacaattcgttttaaaatatatgatatcttaaaacaacaaagtagtttgtcgcgttcgattagcgaaacaatgatgagtgatactgaatataatactttaggaagttatttcatggtacattttgtatatcgctttaatacgttgggtggaaagtcaccaaatcgacgtggaccgggtggtggacctagaggaggacatggctttggcggcggtggcagacctatgcgtttctaaattgtgactagctctgaatgaaaacgggaaagtcccgatggtaatgaacatgactaacatgacttgccatcgggacttttttgtttatccgataatttgctttatatttgttgttcagtatccatataaaaaaggagtatcctatgattgactggaacatactagttagccagatagctacggttgcttttgatatcgtttattttggagccattatcagtacgattgtcgttatcattcttgataaccggaatccggtgaagactatggcatggatactcatattacttttcctcccaattgtcggtcttgttttttatttcttctttggtcggagtcagcgtcgggaacgtatcatcggtcaaaaaagttatgaccgccttttgaagaaacctatggcggaatacatggcgcaagactgttcggatgtacctgaagaatatgcccgccttatccaacttttccagcataccaatcaagcttttccatttgagggaaaccgtattgctgtctatacggaaggctataccaaattgcaatcattgcttcgtgagctccaaaaggcgaaacaacacattcatatagaatactatatctttgaagatgatgctataggacgtttggtaagggatgtactaatcgaaaaagcatctcagggggttgaagtaagagtaatttatgatgatgtggggtgctggcatgtacctaaccgctttttcgaggaaatgcgtaatgcaggtattgaagtcaggagtttcttgaaagtacgcttccctttgtttacaagcagggtcaattatcgtaaccacagaaaaatagtcgtgatagacggacgtatcggttttgtgggaggtatgaacctggcagaacgttatatgcgtggtttctcatgggggatttggcgtgacacccatattctgatagaaggaaaggctgtgcatggtctgcaaacggcctttttgctcgactggtatttcgttgaccgtacattgattacagcttcacgttatttcccaaagatagaatcttgtggaagttcattagttcaggtggttaccagtgaacccattggcccctggaaagaaatcatgcaggggctgactatggcgatcaatggagcgaagaagtatttctatatgcaaaccccttatttcctgccgacagagcaagtacttgccgctatgcagacagctgcactggcaggagtagatgtgcgtttgatgttgccggaacgtgccgacaaccgaatcactcatttgggatcgcattcttacctggcagatgtgatgcaggcaggtgtcaaagtctatttttataagaaagggtttctgcactccaaactgatggtttctgatgatatgctctctacagtagggtctaccaatgttgacttccgtagttttgagcataattttgaagtaaatgcctttatgtatgatgtggaaacggctcttgaaatgaaggagatattccttcaggatcagcgggaaagtacacagatctttctgaaaaactgggtgaaacgttcgtggaggaggagggcagcagagtctgtcgttcgtttgttggctccgctgctttaaaaaggatgcttcctttatctgatatacttttatcttatctgaaaagcgagaaattcacacttccatagactcttctttctatgaaatgcggatgatcttcaaagttattttgcttaccatgctccaatacaaacaaacctccttctttgagcagattatttttgaatattagttccggtatcgattccagctcctttaaagcgtaaggagggtcggcaaagataaaatcaaactgctctcgtccgctgttgataaacttaaatacatcgccacggataggcagacatttgtcagtttgtacttctttcattattttgcagataaacgagtgatgagccggatctttttccacactgatcacacggtcgcagcctcgggataccagttcgatactgatactgcccgtgcctgcaaacaagtcaagtgcagttactccttcttcgaaatcaatataattattaagtacattgaacagattctccttggcgaaatctgttgtagggcgtgctttgaatgtacgtggtacatcaaatcttcttcgtttataaataccgctgattactcgcatgttaataaggcttgcatgtcaatattgttggcaggattcataatgaatacctgcagaatgaattttttcagttcgttcatcaatgtctctttgtccgacagagtgcctgtcagatgtagttcatcccgttcctgattaaattccagttgcttccagacatataatagatagtagatacgatcttcggtttgcatgcactcgaaagagttggccaaaagtagctgccctcgttcgaaacagtaaatgtcaatggcatctttgcgtactgaagcatacattttcttactattccccagtctgcttttgatagaaaaatactcgatgagcggggtagactgagagtagaagcgggcttcgggatattgttcatttaagaatgtataggtgcttttgtctatgccgaagattacgactacattattcttttttagaatattgtacatcactatttcattctcccgtttctgatgattgtgatagaataaaagctctgcctgctcttcttcaaacagttccaatggtatcatggtaaagcgtttgctggctatcatgatgttcacccgtttgtaggagtagcttaaaaagtccgattcgtggaaaacgtttttaagattggctgtcagagacagagaggtgtctacctctttttcgaacagcgactgcgaattgtcgttaatcggattgtagatagaaaaagaaaatccatccgtactaagacggatggataaagtatattgttttgattttgtaaaatcaatcattattcccagttaccagcaccattgttaggattgtcaatagaacctaccatcaaacctgagtatctgcccagtttttcattaaggtctttcaaattgataatttcttgtctgtcaagtccgcccaagtaagtttcatatggagctttcacttcaaacaagtatacaggagcacctgatttagctgtgtcgtttttaacattcatttcaaagatagcaccgttgccataaggaatgtacttcattgaatctgcattgaaaccttttggatagatggtgtccattacagctacccacatggtgtcacgcttaaagttttcaagtccgtttttcttaacttcatcatacttgcctgtttttttagctttgttgatgattgccattgctttcttctcagtcaagccgctttccaattggtcgtctgtcagctgaccaactttcataacgaaaggtaatttttgatttttaacgaaatcaatcagtgtgtcaaaatgttctgtgtacattccgtgatgaagcgaacggtattcctgttgtgctttacggatgtcgatcaaacgggcaatgacagcctgctctctttcctttttcgctttttcaaaattgataggacccataatactgctatagcaaatgtagattaatgcagcagcacagagtactaatacaatattaaatactgttttcatgataaattatgtttttagttgttatattcgcatcgcaaaaatagaataaataaatttaaatacgatagttccgggaacttttttctcgtacaaaaatgataaataactatttagaaaggcaaattaaggaaaattttccttatcaaccaacttttgagcaggaaatagctgtaaaatctctttcagagtttctgctttccacactggcggatgaagtatttatcctcagaggctatgccggtactggtaaaacatctttggtaggggcattggtaaagacgatggatcagttacagcaaaaggctgtgttactggctcctaccggtcgtgctgcaaaagttttttcatcatatgccggtcacccggcttttacaattcataagaaaatataccggcagcagtcgttttctaatgaaaccagtaatttttcaataaatgacaatcttgctacgaatactttgtttatagtcgacgaagcttcaatgatttccaatgaaggattgtcgggcagtatgtttgggacgggaagattattggacgacctgatacagtttgtttattccggtcaggggtgccgtcttttgttgatgggagatactgcgcagcttcctccggtaggtgaggagttgagtccggcactttttgcagatgcattaaagggatatggattggaagtgcgggaagttgacttgacgcaagtggttcgtcagatacaggaatcgggcattttgtggaatgcgactcaattgcgtcagctgatagcggaagataattgctactctttacctaaaataaagataacaggttttccagatataaagatggtgccgggtacggaattgattgatgccatcactagttgttatgatcatgacggcatggatgagacgattgtgatctgtcgttctaataaacgcgcgaacctatataataacggaatacgtgcacagatcctttggcgggaagatgaactgaatacgggagatatgttgatgatagccaaaaataattattattggacagagcaatataaggaaatggacttcattgccaatggagaaatagcagtcgtgcgtcgtgtccgtaagacgcgtgagatgtatggttttcgctttgcggaagtgactctcaggtttcctgaccagaatgattttgaactggatgccaatttgctgctggatactcttcactctgattctcccgcattgccaaaagtagataatgacagattattttataccatacttgaagattacgcagatatatctaacaagcgggaccggatgaaaaagatgaaagcagatccacactacaatgcgttgcaggtgaaatatgcttatgcgataacttgtcataaagcacaaggtgggcaatggcagaatgtttttcttgatcagggatatatgacggatgaatatttgactccggattattttcgctggttgtatacggcatttactcgcgccacgaagacattgtatctggtgaattatcccaaagaacaaattttataaaagatttcttttttttcttcgtaaataattgattcccagtctagatgaatggggagatactcgttgtgaaaaaataaatatgagattatatttattttttttcaaaaacctctaagtgtttttcaaggtatgggttgttatataaatgtgaatcgaaaataataaatggaatatcgattctaatatttatataaaaactaatgtttaatcttaaattcaagtgtatgagaatcaatgactcgtgtagaggctcgaagatttttcgggcattgttgatcttgatgctattcgcccttccgacacaatctgcaatagcacagttaacaattaggatctccaattcttctttaggaactgtgattaagcaaatccagtctcaatccaagtatcaatttttttatgatgacaatttggcttcaatgcgaatagagtcattgaatgttaaagatgtttctttggtagaagtactggataaggctttgaaagggaaaaatgtcgtttataaaattgatgacaatgttgtttatttgtcgaaagcaaatgcatcttcttcgacaaagtcgactcaacaacaacagaaagtaacaggtaaggtggtagatgctaataacgaacctttgattggcgtttctgtattggaaaaaggaacaactaatggtactattactgattttgatggtaattatacattagtcgttacaggttcaaatgcagttttgcaattttcgtatgttggatatcaaactttggagagggctgtagcaggaaagactgctattaatatcactttaaaggaagatgctcaagtcttggatgaagtcgtagttacggcattgggaatcaaacgctcagaaaaagcgctgtcttacaatgtacagcaggtaaatgctgatgcagtgactaccaataaagatcctaactttattaactcattgagtggtaaagtggcaggtgttaatatcaatgcttcttcatccggagtgggcggtgtatctaaagtagtgatgcgtggtacaaaatctatcatgcagtcttccaatgcattgtatgtagtagatggggttccgatgtactccaatgcaaataaagtgaatgggacagagttttcttctaaaggaaatactgagccgattgccgacattaacccggaagatattgaatcaatgtctgtgttgactggtgcggcagcagctgcactttacggttctgatgctgccaatggtgcgattatcattactactaaaaaaggaaaagaaggtcgtgtgaatatcacagtgaatagtaatgttgagtttaatgctcctttggtaatgcctcgtttccagacacgttatggtacaggtattggtggcgtgaaagatgataactccagtcgtagctggggccctaaactgacagaagccagatattttggatataatcctcgtgatgattattttcagactggtgttataggtacagaaagcgtatcattctctaccggttcggaaaagaaccagacttatgcttccgctgcagcggttaattcaaaaggtatcgttcctaacaacaaatatgaccgttataatttcaacgtacgcaatactacttcatttcttgatgataagatgacattggatgtaaatgccagctacattttgcagaaagaccgcaatatggtgaatcagggtacttacaacaatccgttggtaggagcttatctgttccctcgtggtaatgactgggaagatattaaaatgtacgaacgctatgacgttgcacgtaagatctatactcagtactggccgacaggtgatggtaatatgactatgcagaatccttattgggtgaactaccgtaacttgcgtgaaaataagaaagatcgctatatgttaggtgcaagtctgaattatcagattcttgactggttaaatgtttccggacgtgtccgcctggataattctaacaatgattatacggaaaaggcttatgccagtacaaatactcagctgacagagttgtcagatcgtggtctttatggcatttccagaagctacgaaaagcagttgtatgcagacttcctggtaagtgtaaacaaaacattcggtgaaaaatggtctttacaagctaatatgggtggatcgtttactgatatgcgatatgatgaaatggctgtacgcggacctattgctgatgattcaaaaacgtttgctggtgaaaaagccggattgacaaacggtttctatattcaaaatctgagtacgaccaagacaagcaaaatgcagtcaggatggcgtgaacagactcagtctatctatgcatctgccgaagttggctaccaaagtacttattatctgacattgacaggtcgtaatgactggccttcacagttggcaggccgtaactctgtcaataaatcattcttctacccttcggtaggtatgtctgtagtgttatctgaattgatgcctaaattgaataaggactatctgtcttactggaagatacgcggttcttttgcttctgtaggtacagcattcgaaagatatatagctaatcctttgttcgcatggaataccagtatcggtcagtggagtaacctgactgacttcccggtatatgacttgaaaccggaacgtaccaattcttttgaagtaggtatgaatatgcgttttcttaagaacttcgaactggatgtgacttattataacgccaagacaatgaatcagacattcaatcctgagttgccggtaggtgaatatgctcgtatctacattcagacaggtgcagttcgcaatcaaggtcttgagttagcgttgaattacaataatacatggaaagattttacttggaatacaggagttacttattcaatgaacaagaataagattcttaccttagctgataatgccatcaatcctatcactcgcgagaaattctctatttcttctctgaatatgggtggtctgggtagtacccgtttcatcctgaaagaaggtggaagcatgggtgacatttactccttgatggatttgaagagagatgccaatggagctgtttatatcgatgagaacaacagtgttgtaacagagagtctggaagctaataattacatcaaattaggtagtgtattgccgaaaggaaacttggcatggcgtaacaatttcagttggaaaaacattaatgtggcattccttgtatcagctcgtctgggtggagttgtattctcacgtacacaagctgttcttgataacttcggagtttctgaagcatctgctgctgcacgtgacaaaggttatgtatcggtaaatggaaacgaccgtgtaaatccggaaggctggtattcagtagtagctggtggtacggctgttcctcagtattatatttattccgctactaatattcgtttgcaggaagcttctatcggttatactattccgagaaaatggctgggcaatgtgtgtgatatcaaagtttcattgatcggacgtaatctttggatgatctacaacaaggctcctttcgatcctgaaagcgtggcatctactgataacttctatcagggaattgactactttatgatgccttcattgcgtaatattggctttaatctgagctttaaattctaaataaatcaagataggtatgaaaaatataataaataaattagtatttggatctcttaccgttgccttgtcctcgtgtatcggtaactatgagaatatcaattccaacccatatgaagctcctgatttgtcagcggatggatatgctttgggatctgccatgaataacctggccggttgcgtggtatcaccggatgtaaatacagctcagttcacagactgcttgttgggcggacctttaggcggatattttgccgattctaatgccggttttacagaaaccatttcaaacttcaatccgaaagacgactggagccgtgtgtttctgaaaagtgataagattattccgacattatattctaatctgacccaagtgaaacttgtatcacaaaatacgaatgatccggttccttatgccattgcacaagtgataaaggtggcagctatgcatcgtgtaactgatgctttcggtccgataccttattctcagataggtgcgaatggcgaaattgctactccttatgattctcaggaagtgacatataatacattcttcgatgagttgaatgcagctattgccacactcaatgagaattctaacgaacagctcgttcctacagccgactatatatataaaggtgatgtaaagaagtggatcagatttgccaactcactgaagttgcgtcttgctatccgtatagcttatgctaatccggtgaaagctcaacagatggctgaagaagctgtgaatcctgcaaacggaggtgtcatcgaatcgaatgcggacaatgcaacatggaactactttgagacttcacaaaatcctatttatgtagctacccgctacaatcaggtacagacttccgatcatggcggcgtaccctgtttgactggcggtgatacgcatgctgctgccgatatcatctgctatatgaatggttacaaggataacagacgtgaaaagttcttcacaaaatccgaatgggcgggacaggactatgtaggaatgcgtcgtggtattgtcattcccgaactgaagacaaccggacataaatactctggggtgaacattgctcctacatctccgctttattggatgaatgcagccgaagtagctttcttacgtgctgaagggcaagctgtttttaacttcagcatgggtggtacagcagaatcattctataatcaaggtatccgtctgtcatttgagcaatggggtgcagacggtgtggaagactatctgaaagatgatgtaaacaaaccgactgcatatacagacccggcaggtacgaacacttatcagaatgctttgtccaatatcactattaaatggaatgatagtgctgacaaagaagagaagcaagaacgcattatcgtgcagaagtggattgccaactggcaattgggtaatgaagcttgggcagacttccgccgtaccggatatccgaaactgatcccggtgaaagaaaataagagcggtggtgtcgttgattcagagaaaggggcgcgtcgtatgccttatccgttggatgagtttgtcagcaataaagcaaatgtagaatatgcgattgccaactacttgcacggtgcagataacatggctacagatgtatggtgggcttctaaaaaataatattaaacttaaaggaaagtatatatgaaaaataacctgaaatatagattgtctgctctgctgtttctggcatcagctctgacaataacttcatgtagtgattggacagatgtggaaagtctccaattgaatactcctacatttgaagagcagaatcctcagttgtatgctgactatctgaaggatttgaacagatataagtctgaagaacataaggtcacttttgtttctttcgagaaccctaagggatctcccggcaagcaggctgaacgtctgaccgtcgtacctgacagcgttgatttcatttgtctgaataatccggaagtaagtcccgaagtacaggcagaaatggtcaaaatacgcgagaaaggaactcgtacggtttacagtattgattattccagcattgaaaatgcctggaaggagaaagtaaaagccgaaccggagttgacagaagaggatgctcttcagtatatcggtgaacgcaccaatgagatgttggcactctgtgacaaatataactttgatggtgttattgctgattatacggggcgttcgctggtgagccttccggaggcagctctgaaagaatataatgaccgtcaacagaagttttttggcgaggtgatgaactggcaaggcaatcatgatgacaagactctggtattctacggaaatgtacaatatttagtgccggagaatatggatatgttaagcaagtttgactacatcatgttgaaaactgtttcttctaccaatgctgatgatcttgctttaaaagcatatttggctattcaggcgggtatagatgcagtaggcggtacagaaggaggagtgaatcctgttcctgctgatcgttttatcgtttgtgtcgaattgccgcaggctgacgataaggataaagtgaagggttactggagtacagtggatgaaaaaggcaataaactagtagcagctccgggagcagcccggtggatggttgaagcatctcctaattacacccggaaaggaatctttattatgaatgtccataatgattattataacaatacttatggatatgtgcgtgaagttattcgtattatgaatcctaataaataagaatagaaatgaaactctataaatattgttttgcgcttttggctcttacaacagtcacagtgagtggttgtaagaatgaagatatcaatgaagagcatcattatgacaataaactctatgttagctcggctcctgtttgtgatgatttgctgattaaacccagtataactgaggctacccgtgaacttagctatcgtatagcatcgccggcagaacaagatattcaaataagctttgatgcggctcccgctatgacagcagcatataatttgatttacaatgataacgcaactgcactggattcatatttttataatataccaacaaaaactgctactattaaggcaggggatatttccagtgataatattgtgattgactttaagaataccaacgaattggataagtcaaaacgatatgtattgcccgtcaccattctagatgcatccaatattgatgtactcgaaagtgcccgtactgcttatttcatatttaagggtgctgcccttattaatgtagtggcaaatatcaaagaaatctatttcccaattaactggaagagcagtgtgaatagtctttctactgttactattgaagctttggttcgtagtgaagactgggtagcaggacgtgataacgccctgagttctgttttcggtattgaaggtaaattccttgtacgtattggtgatgctgaccgtccacgtgatcaagttcaggtagtagctcccggtggtaatttcccaggtccgaatgttgttccgggtttaccggttaatgagtgggtacacattgccattgtttatgataatacaacaaaagaacgaatctattataaagatggtgtgcctgtttataaagacgaagcagcttcaggtaatgtatctttgagcagtggttgttatattggtcgcgcttgggatgatactcgttggttgccgggagatatttcagaagtccgcgtgtggtcagtgcaaagaacggcagagcaaattgccactaatccttatgaagtagatcctgccagtgaaggactggttgcttactggaagtttaatgaaggtgctggaaatgttattaccgaccagactggacatggtaatgatattacaggttcgggcgatcctacttgggtaaaagtagagattcctaagataaattaattgttggtttaatcttttattcaagaattcattatgaatatgaaatatataacttcgggtttgttcgctgccatgattgtgagcagtactgcattcttgacctcttgtgctgatgatcttgaggtcggaaagaatattgatgagtcggcctacagtggcatttatgaaaataatgcatatctgcgtgatggaaagtcgaacttagtttctaaggttgtcgaattgcacggtgagacttatgctactacagtaaaaatggggttgagcaagacacctaatacagctacatcggcaaaagtgaaaattgatgctgcttatttggaaacgtataataaggcgcataatacagattttgcattgtatccgcaggacttggttacctttgctaacgaaggaatacttacagtgaacgctaatactaaatcagcggaggtagagatgactattcgggcaggagaaggtctgcaggaagataaaacatatgctattccggtagctatcagtgatcagagtagtgatatcactattaaagatgaagatgcgaaacattgtatttatctggtgaaagatatgcgaaatgccggtgatgcatataaaggagaaggtgtaatgcaaggttatttgttctttgaagtaaatgacgtaaatccgctgaatactctttctttccaattagagaatggaaaacttctttgggatgttgttgtactgtttgctgctaatatcaactatgatgctgaagcaggacgtcctcgtgtacaatgtaacccgaatgtacagtatctgttggataataatgaaactcttcttcagccactgcgtagacgtggtgtgaaagtattgttaggactgcttggtaaccatgacattacaggcttggcacagctttccgaacaaggtgctaaagactttgcccgcgaagttgctcagtattgtaaggcatataacttggatggagtaaattatgacgatgagtattcaaacagtcctgatttgagcaatccgtctcttactaatccaagtacggctgctgcagctcgtctgtgttatgaaaccaaacaggcaatgccggataaactggttactgtatttgattggggacagatgtatggtgtagctactgtcgacggggtagatgcaaaagaatggatagatattgtggtagccaactatggtagtgctgcatatcctatcggacaaatgacaaagaaacaatgctccggtatttcaatggaattcaacttaggtggtggcggtagtttatctgcctctaaagctcaaagtatgatagatggagggtatggatggtttatgggatttgctccaagtccggctaaatatggtagtgttttcagccgtcttcaaggtggtggcgaagtattgtacgggtccaatgtagcagcaccgactatattctacaagaagaatgatccgacgccatataaatatccggatgatctttaaataaaataggaacaaataaaaaacaagaatatgaaagcacattataaactctttttatctctggcaataggatcattcgttacttttgctggatgtcaggatgatgaggtggtggatttggttaaatatccggtgaatcagcctgctataacgattgacgatgcggaaggagcgtctaaagcgacgttgactgcggtttacaaatctgatggtacattggaattagatggccctgtcactagaacttatacattccattttgctgcatcaccggaagatgctacagtgacttttgatattataaatactaatatcccaaaagaaaatgtagagatcagtgccactaaagtagttcttcctgccggttcaacagatgcttctgtcactgtgactttgaaggatgaagattttagttttgcagcatccaattatgatgcgactacttatgaattaggggtgaaagccagtgtggaaggatataagataggaactgaaccaatagaatctaaagttgtaatagagaaggaggcatatacagcttcatgctctgtggttggtgagagcggtaataacgttgcatttgaacgtgctttttctcaaggagcgattgtaaatcctgatcctatatcctatactttcaagatgaagttggataagccggcaagaaaagacgtaaaagtgaaacttgccactacgggattggatgaacagttcatgaagaatatcactgtaactcctgctgaaattaccatagctgccggagagttagaatcagcagaggttacctggactattactgatgatttcttgctgacaacagctggagaagaatctcacactcttgttgttactgcatcagcagaaagtgaagaccccgttgtgaaggttaatagtaaggagaacttcttaacctttaatgtggataaagtacttagaaactttaaatatttgtctgttataggtagtaactggactgaattgtcgaaagcaggttggagtgcggagattccttctggtgtctccggtagagctagttatttgattgatggtaatggaggaagctatggatcagatgtatatagttataatccattctggtttgttattgatatgaaatcagcacagacttttaatgctttgggtatggattattattatacgtatgcttctaagaaagtacgtatttcaacttcattggataatgaaaactggactccacagggagtgttggaagttcctcgtgtgggtaatcattatttccaattcttctcttctataacagctcgttatgtaaaggttgaattattggaaggctttggttcatatattgatgtaactgaagtttatatctacaacgctcagtaaagtctagtcattagcagataagttaattttagagccaggcttcattttgaaagcctggctcttttcttgtataagctactatgtccctccctgtctcctcgtaagggaacccttgtgccaagggcttggcacagttgtgccactacggtgtcattgttgtgccaacggcttggcacagccgtgccaccaaatggtgacagttgtgtcttctgagcgtaacagtagtatcacttcgtgttactgccgatcaccagtcataatcttcaacgtatgcatcaaagttttgtagatgagttgctccgcaattcttgaggatatttaatattctttgttgctcggagggggtaaggaggcgttcgcctttgcggatgcggtagtaagttctgcgaccaaaatagctcattaaatgtgatatgacagtttgcatttgcttataaggcaagtcttctaacattctgatgaatcccttagcataacgtactttgacattagaacgataataaggacaattcccttgttgggcagcgagatgtttgggactgataataacccagtattcaatcttttccggtacgctttgtgctgtaagtagtcttaagcaagtgtttgcttttgaacattcccgattgaggcacattgcgtactgataggggactttggtaaagtcaatttcttcttccatgatttatagttgtttgtccggcaaaagtagtgaatactaactgaaaaatagcctgaaagtaaagaagtttactttcaggctatcgttttttttgccattatccggataaagtctttcagaacagagagaaagtcagaaaaccggaagaaaaagggcctaatataggaacgtgaatttaatcgatgaactaactactgttctttggaaaaagaataaggcatatcctcttctttggttcctctgttcagattcggccgattactcatgtctactttgatagtacctcccttgaacaaatcttcgtgacgcagataattcttggtatgatcagcaccattgaagttcatggaatcaatatagaaattttccgtgctgttattgggcgcgtcgataacaagactattgccgttctcgaagtgaagagtagcctttttgaacagaggagctcccatcacatattcgtccgttccagggcaaacagggtagaaacccaatgcagagaacacataccaggcagaagtctgtccgttgtcttcgtctccgcagtaaccgtctggtccgggcgtgtacattctgtccattacctgacgtaaccaatattgtgccttccacggttgtcctgcatagtcatagaggtaaatcatgtgctggatcggttgattgccatgtgcatagttgcccatattcatcacagtcatttcacgaatttcgtgaattacctgtccgtaatagctgtcatcaaaaatgggcggtacggcaaatacggaatccatcatggtaataaacatttctttcccgcccatcaggtcaataagtccctgcggatcgtggaagacagaccaggtataatgccagctgtttccttccgtaaaggcatctccccatttcagtggtgagaaaggagactggaatgtaccgtcttcgttgcgaccacgcattagcttggattctttatcgaaaagattcttgtaattcatggcacgtttggcaaacaggttgatttctttcttgggacgtttcagttcctttgccaaccggtagatacaccagtcatcgtatgcatattccagagtacgggcggcgttctcgttgattttcacatcgtagggtacgtatcccagtttattatagtactcgtatcccaatcgtccggtggaagaaacctccggatgcacattctccgttccatgaatcaatccttcatacaacgtcttgatatcatcgacttttactcccttcatataagcgtccacaaggattgatgcggagttatttccgaccatgcaacctctgtgtcccggacttgcccattcggggaagaaaccgctttcaaggtatgtattgatcaacccttcctgcatctccttgttaaccgacgggtacatcagattcaacagtgggaagaggcagcggaatgtatcccagaaaccggtatcggtaaacatatatcccggaagtacctgtccgttatacggactgtaatggatgggctggccgtttgcatccagctcatagaacttgcgcgggaaaagcagtgaacgatacagacaggagtagaatgtacggtactgatccagattgccgccttctacttctattttgcccagcacctgattccaggcatcttttcctttttgggcgagttgttctatgttatctttgcccagttcgttcatattggcggcagcctgctcaaagctgatgaaagaagaggcgatgcgtgcattcacctgctctcctttgcgggttttgaatccgatgatcgctccggcatggtcggttgtctgttccgctacgttctcttgcagatttccgttctctaccgtagccttataggtgaaaggcttgtcgaactcgatgataaagtagttcttgaaattttcgggaacacccccgctgttgcgtgtcgtataaccgattattttattctcttccggaagaatcttgatggatgaacctttgtcgaaggcatctacaatcacataagaatgatcattctccgggaatgtgaaacggaaaagtacggcacgttccgtcggtgtcatttcagtgactatatcgtgttctgccaggtatactttgtagtagtaaggagttgccacttcacctttatgtgcaaaccagcttgcacgtttctcttcgtcaaacaccggttggcctactatcggcattatcgagaactgaccataatcattgatccatggactgggctggtgtgtctgtttgaacccgcggattttgttggcggtataggtatattgccatccgtctcccattttgcctgtctgtggagtccagaagttcataccccagggacgggcaatagccggataagtattacctgttgataactcaaaagtagactgggaacccatcagcggattgacatactgcgtccagtctttggcttgggacaatagcgtacaactaagtacacaagctatcaataagagtcttttcatgattagtaatggtttttatatgattattgaggagagttgttacttccccattgtgtaggatggtcagtcattttgatctccatgattccgcctgctacaatgtcctgatgtccgaagaatggcgtgtccagaggtttgccgttcagcaatacgctttcgatgtatttgttgcttttggagttgttcttcaccacgatgctgaatgtcttttcactggggagattgatcacagctttgtcgaaagccggacgtccgatagaatacaccggtttgcccgggcatacctgatagaatcccatcgagttgagtatgtaccatgccgacatctgtccgcagtcttcattgccggacaacccgtcgacgttgttggcatactggctccggtagacactgtccactaattcctgcgttctccacggacgattcacatagttgtacagatgaatcacgtgatgactcggctcattgccatgtgcatactgaccgatcagtccgctgatatcagccgaggtggtttctccgtccagactcgaatcgactgtaaacagcgaatccagcttttctacaaaagcctcctcgcctcccatcagttttacaagtccttccacatcgtgcggaacaaaccaggtccactgccaggcggttccttcgcaatagtcatcgctacggtgagtggaggcacgcgggttgaatggggtgcgccattcgccattcgaatccagtccgcgcatgaagcgggtcgatttgtcgaaatagaactcgtaggctttggcgaaacgttcatactttgctttgttttcgaagtcgttcattgcttcggcaaagatggagatacaccagtcgtcgtaggcatattccagcgctttggctacagattcattttcgcggtcgcaggggatgtagccgatggcgtttttataatacttcgctttgggcatcagatgcggcagcaccagatcggggcatttgatgcctgtagtgtcatattcggctgcccgtagactggctttatatgcttcgtgagcatcaaaattgcggtaacctttcatataggcatccacgataacagggaccgcatgatatccgatcatcgttccagtgtagttggaagccagatcccacattgggtatattccgccttcctgatgtttcctgatcagtgaattgatgaactgattgttcagattcgggtcgatgatcgtcatcagcgggtgcagtgcacggaaagtatcccacagggagaagacagtatacagcggattaatggtatctccctgatgtacttcgagatccatgccgagatagcgtccgtccgcatccgtaaacaggttcgggctgatggccgtatgatacagagcggtatagaaaatggttttatcttctttatcggaagtggtgatgtctattttagacagataattattccaggcaatgcgggcatcttttcgtaccttgtcgaagtcccattcgggaatttcggattccacattcttgcgtgcgccggcgatatcgacggcggatacacccacttttaccagtacttcttcgtctttctttgtattaaagtgcagtacggctttgcatacaggcaggcgtttgccgttgtccattgtgacagagtcggtgatgagggtatatgcgaacggtttggaaaacttggcgtagaagttaatatactggtcgaaagcccagtaagtcgtcttcttatgtccgcagatttccgtgtcactgataacttcgatttccatctcgtagttggtctgccgttgcaggctgtagtccagatcgatgataaatccggattctgtgctttcggggaaagtgtagcggtggatggcgccgcgtttggtagctgtgatttccgcttttacctgataggtgtcgaggaagacggagtaatatccgggttccgcagtctcattctcgtgcgagaaagcagaggcgtaagccagcttctggctttccggatcagttgtcagatactgcggtttgccgacaatcggcatcagtaatacatctccgtagtcacaacagcctgtaccgctgacgtgggtatgcgaaaaaccgttgatcgtgttgtcgtcgtaataataaccggagcaagcgtcccagccgtcgatccgggtgtccggactgggctggatcataccgtgcggaactacggctccggggaaagtatgtccatgtccgccggtgcctatgaaaggattgacataagcactataatcttttacactgggggactctgtgcaggagttgagcattataaatcctccgaaacatcctatcagaagtgtctttaatttcatgtcgtttattagtttaagtttaacacaggactcattttttatctgaagagataaagatgttgtttcctacgattttatattcaataggtatggaattctgcaaggatttcaataccgattcgatggttgattttttcttcaatacacccgaatatgttttgtccgaccgaatgtcaggagacagaatgatcttcacgtcgtagaagcgttccagtgccttggtgatggtaaatatgtttgctttattgaatggtatcagattgtcacgccatacagcatccagtttcgcgtcgacctgtttcaccgtcagtcgtccgctgtttctgttcagttcggcacgctgaccgggggcgaggacaatttgtccttcgtccttgttgcctttcacttcgatttctccttcgatcaaggttgcttcggctatccggcaacgtttgtcgcatttgaagttgaaagtggttcccagtacacgtacgcgcatagcgtcgctttctaccgtgaatggtttatggcggttcttggtcacttcgaaataggcttctccgtccagatacacattacgttctttttcggagaattcgcgcgggtacttcagcgtggcggcattgttcagccagaccttcgttccatccggcaagacaacttccttcacgatgccttcattggcaacggctaccagcatctgatgctccggccggttgtagaaccaatatccggctcctccgcccattagtaaagcaacggcaaggatggccgcatatctcatccagcgatgcatatgcagtactttatctttcttctttttctcttgcgacagttgtttataaagccttttttccgcattagccattctctgttcatcggcataatggtcaaacttacccagatgataaatttcttccatgcggaacaactggcgggcattttcgtccgattcgctgatccaggcatttacctcgatcagctcttcttcagaacactgaccagtcagatatttgtttattatttcttcgctcagatttctcattttcttttccttcatataagtaatacaactgaaaccccaaaaacacttatctttaatccaataaaaataagaggagaatgaaccaaagatgtccgagacgatttcgcaggaacttcaaagccttatacatatgtgcctctaccgtgcggagtgaaactcccagtacatcggctatctccttatttttcatgtcgtgcagatagctgagcttgaaaacttctttgcacttgtccggaagctcattgatcgcatcgtgaatctctttccgcaattcccggtcttcgatcttgcggatcacttcgttgttgtccggctgataaaactctgcacgcctccggtttatctcttccatggcggcgcaatagccatcttctacattacgatgtttcaatacgttaagggcacgtgtatagacagcacgatagaggaaagcctgaatctgctctcctatctctatgctgtcttttcgtttccaaagctctacgaacacgtcctgcactacatcctccgcctcttcttctcccaccagtcgggtggcatagaatatcaggctggggtagtacctgcggaatagagctttgtaggttaagtcgaagttttcattcatttttccgatagattagtttaggtggacctactgggtctgttcttcaaattcgacttccactaatggagtattccccatttcaaattcgacggtggcaccgctcataatctgttcatgggtaaggtaggtcttgttgtacggttgaccgtctactttgatagattgaatgtaaatattctctttgctcactttgggagcaagtactgtaaatgtctttccgttagccagatgtaacttcatctccgggaacaggggagtaccgatttcatactttctgctgaccggattgacgggatagaatcccatcgcgctgaatacgtaccaagcagacatttgtccgcagtcttcgtttccgcaaagaccggcaggctcgtttttgtaaagttcgttcattactttggcaacgtatttctgtgtcaggttctgttgtcctacggcattgaagagatagattacgtgatggctcggctcattgccgtgagcatattgcccgatcattcccgtgctgaagatgggaagttcttcgtcggctgccggatggtaggtaaacatactgtccagtttctctgcaaagcggcttgtgcctcctgtgagatcaatcagaccgtctatgtcatgctgcacggaccaaaagtattgccagccattgctttcgcagatatgcggagtgtattcgtcggctttgaagtctttgataaagtttcctttatcgtcacgcggctgcatgaacgaagtggccgggttgtaaacattcttatagttctgagaacgtttgtagaattcgtccgctatctctttcttgcccatcttgttcgccatctcagcaatgcagtaatcgtcaaatgcatattccaatgttttggacagtgaccaattttcggcgttgtaatgatctgtcacattgtaaggaatatagcctaattgcttgtatagcccgatgccccggtagttatccagattggcggtagctacgcaggcggccagtgctttctccgcatcaaagttgcctatacctttcagataagcgtctacaatcacgggaacggcatgatagccgatcatcatatcggtttcactcccgtagaagttccatacgggcaggcgtccgttctgttcaaagaaggcgatgaaggattttaccatatcgttgacacgttccggttcggtatatgtgaaaaggggatgggcggcacggtaggtatcccaaagggagaaagtgctgtaattcacccagccgtcactctgatgtacttttttgtcgggaccgtaataggctccgtctacgtcactgtaaatcgtaggtgcgatcatcgagtggtacagagctgtataaaagtttactttatcgtcttgattgtcaccctcgacttcgatctttcccagttggcggttccagtttgcttttgtttctgccagatacttgtcgaagtcattttcgggcacttcggcttgcaggttcttggctgcgccttccatgctgacgccggagatggcggtattgacgagaatttgttctccttcttcggtatggaagtcaaaacgtgcgatgacagccgtaccgatgtgttgcttgtctttgataatggcagtcgtatccagttccaccttatcgaaaggcttggagaagcgggtgcggaagtagattcgctgatcgcgtgcccagccgtcggagtaacggtatccttgaatcgtcacagagtccactacctcgatgtgcgaatcgttcgtgaagtcccagttcatggctttcttcagattcaggaagatggcggcttcggcttttgggaaggtgtatcgctggatgccacaacgttcggttgcggtcagttccacgttgatatggtagtctttcagacgtacttgatagtagcctgcataggcgctctcttcatcgtgagaaaacttggagtagatgcccagcggcgcttctgcctctttgtagggcagtgtgaccggcatgaaagagatgtcgtacaggtcgcctgcacctgttcccgaaaggtgggtatggctgaagccggcgattgtactgtccggataaaagtagccggagatgcggtcccatcccggaagtccgttatccgggctgagctgcaccatgccgaagggggcttgtgcgccgggataagtgtttcctgtgaaatcggtgccaataaaaggatttacatacgatgtgtaatcaatttcagcttgtgtctgtttggcgttgcaggatgcaaaaatacaaacgattagaagtaggtaaataggtgttttcatcggtgtacgggtattggtgattacttattttattatttgaaggataagaaaaataattaatctgtttacaaaggtaggaaaaagttgtgataattgagtttatatcacgaatatttttggcaggaggccggttggttgcagatggcgccggagttttccggtgtcgggaggtgtcctcatcggtgccggaattagaaataaaaaaccgtgtcttaaagtcacccgcactttaagacacggttcttatattggatgtatattactgctttcttagatacctgcgagttccagtactttttcgatagcggcattcagtccgtctgtattcttgcctccggcagtagcgaagtgaggttgaccgcctccgccgccttgaatcagtttggctgcctctttcaccaggttgcctgctttcaagccaccggccaccagattgtcgctcagcatgacggtcagcataggtttgccatggtcgaggcttccggccacaaagaacaagttttctgtgatttcgccgcgaagctggaaggcgatattcttcaccacttccgcaggcaacggagcacagaacttgattaccttgataccgtgaatttcctgtatattcttcagcagtctttctttcagcgaggcttctttctctttcatgtagtcttctacctgctttttcagtcctgcattttcctcaatatacttgcggatggcaatacccaggtcgggtgcgttgttgaagagtgatttcaattcactgatcgtatcctgaatggtatccagcatttcttccacacgggctcccgtatatgcttcgatacggcgtacaccggctgcaacagaactttcggaaatgatctttaccataccgatatttccggttgcggctacgtggatacctccacagaattcgatagaagaaccgaactggatcacacgtactctttcaccgtacttttcgccgaagagggcgatagctcctagctctttcgcttcctcgataggaatgttgcggtattccttcaaagggatgttggcacgaatcttggcattcaccaagtgttctacctggcggatttcttcgtcggtcaccttctggaagtgagagaagtcgaaacgcagtgaatccggtgttactaacgaacctttctgttcgatgtgctcgcccagtacttcacgcagggcagagtccagcaggtgagttgccgagtgattggctgcgcaggctgcccgtttgtcggtgtctacacaagccatcatcggagcttccggatgttccggcagttttttggtaatatgtatcggtagattgttctctttcttggtgtcgatcacttcgatggtctcgaattcgttgaccaatacaccggtgtcgcctacctgaccaccgctttctgcatagaacggagtacagtcaagtacgatctgatacagtgtctggtttttctgcttgatctgacgatagcggagaatggatgcttcgtattcggtatagtcgtaacctacgaattcggttgttccttctctcagagtcacccagtcaccggtttcgatggcggcagcgttacgtgcacgctgtttctgctgttgcatttccgcgttgaactcttcgatgttgactgtcattccgttttcacgaagaatcagttctgtcaggtctaacgggaaaccgaaagtatcatataaggtaaaggcatctttaccgctgatttctgtctttccggcagcctttgtatcttccattgtcttatccagcagacggatacctgtttccagcgtgcggaggaaggcttcttcttcttccttgattactttttcgatcagacctttctgtgcgatcagttccggataagcgtctcccatgttgtcgatcaacaccggaagcagcttgtacatgaatgactgtttctgtccgaggaaagtatatccgtagcggacggcgcggcggaggatacggcggatgacataacctgccttagcattggaaggcagctggccgtccgtaatggagaaagcaatcgtacggatgtggtcagcgattacgcgcatggcgatgtcctgctgcttgtcttttccgtactctgtgcctgacattgctgcaatcgctttcagcatcggctggaatacgtctgtatcgtagttggaagtcttgccctgcaaagccatacagaggcgttcgaatcccatacctgtatcgataacctttgcaggaagtggttcgaggctgccgtcagctttacggttatattgcatgaacacaaggttccatatttcaattacttggggatgatcgtggttgacgagatcacggccggagattttggcacgttcttctgccggacggaggtcgatgtggatttccgaacaaggtccgcaaggacctgtatcacccatttcccagaagttgtcgtgcttgttgccgttgatgatgtgatctttcggcagatactgttcccagtaagaagcggcttcgtcgtcacgactcagtccttcttcggggcttccttcgaatacggtggcgtacaggtgttccggattcagtttcaatacttctaccagatattcccatgcccagttgatggcttctttcttgaaatagtcaccgaatgaccagttgcccagcatttcgaacatggtgtggtggtacgtgtcgtgtcccacttcttccaggtcattatgctttccgcttacacgcagacatttctgagagtccgcgactctgtggtatttggccgggtggttacccaaaataatatctttaaactggttcatccctgcgttggtaaacatcagggtagggtcatcttttatcaccatcggagccgagggaacaatgtggtgtcctttcgactcaaagaaattcttgaatgaatctctgatctcttttgcagtcaacatattcttctatatatctattgttgaggttaatattctcaaaaaactgtgcaaagatagcttgtttttattacttttgccgtattaacaagcgaaatatttccaaaaagatgcgcaaagtttactacatctacaatccaaggacgcagacttatgaccgaatttaccctaccgtacggcagcgtgcgcttagcattctgcgccggctttttatcggtatgggacttggagccggatgcttcatcgtcttgcttctggtgttcggatcgccttcggagaaggagctgcgaatcgaaaatagccgtcttttggcgcaatataatgtactttcccgccgtctggatgatgcgatgggggtgctgcaggatattcagcagcgtgacgataacctgtatcgggtgattctgcaagccgatcctgtttcgccggctatccgtcaggcaggttttggaggtacgaaccggtatgaggagctgatggatctggcaaattccaagctggtggtaaatacgacccaaaagctggatgtactgtccaaacaactctatatccagtccaaatctttcgatgacgtggtggatatgtgcaagaatcatgatgaaatgctgaagtgtattccggccatccagcctatctccaataaagaccttcgcaaaactgcttcgggatacggaacacgtattgacccgatttacggtacgacgaagttccattcgggaatggatttctccgctcatccgggaacggatgtctatgcgaccggtgacggtacagtggtaaaagtaggatgggaaaccggatatggcaatacgattgagattgaccatggcttcggttatctgactcggtacgctcacttacagagctataacacgaaagtcgggaaaaaggtagtacgtggcgaggtgattggaaaagtgggaagtacaggtaagagtaccggtcctcatcttcactatgaggtatatgtgaagggaaaggttgtgaatcctgtcaactattacttcatggacttgagcgcggaagattatgagaagatgattcaattggctgccaatcacggtaaagtgtttgattaatctctttaaacaatgatttctatgctgaatacggacaaagaactaaaattatattactccatagccgaagtggccgatatgtttggagtcaacgcatccttgcttcgtttttgggagaaggagttccctcagatttctcccaggacgacggggcgggggatacgtcagtatcgtaaggaggatgtagaaacgattggtctgatctatcatctggtgaaggagaaaggtctgacgcttcccggtgcccgtcaacggttgaaggataacaaggaagctacggttcgcaattacgaaattgtgaaccgtctgaaaggtattaaggaagagcttctggctatcaagaaagaactggacggacgataaattattcctccacccggttcacctgtttgatgttttgaatcttcttcagattattgcagattgtttttacatcttccacatcgtgtacccatagctgaatctttccttcgaatatcccgtcatttgtttcaatggcaagtttacggatattcacgttgagctgtctggagatgacctgagtcacttcgtttagaagtcccatactgtctatacctcttaaatagatatatacgaggaaagaaagttctttgtgagtatcccattcggtcgctaatatacggttgccatagctgcttttcagcttggcggcaacagggcattggcgtttatgaataataatgcggtcgttttcatcaacgtaacccaaaacatcatcaccgggaatcggatgacaacattcggccatgatgtatttcttttgcagactttcttcggtcagtttaagaatctctttcggattgattttttctttttcctgcggttctttttcttccggtttttccttgttgctgttcccgaaggagaacgtcaggtatttcttccagttgctggtctgcttttctctcagctcgtttttgtccgcttctcccaaagtaatggctttgctgccgatagcggccagtaactcttcttcattcttaaagttgtgaaacttacgcaacttctcgatgacagcttcttccggacgtatttcttccttcttcagaaactcactgagtagctcttcgccaattttctgattcgctttccgttctttgcgaagaatcgctgcgatcttggcacgggcacgggcggtcgttgcgaatacctcccattgcggttgtacacgttgggattttgaagttaatatttcaacctgatcaccactttgcagtttatggcttagcggcactagtttatgattgactttggcgccgatacaatggctaccgatatctgtgtgcagtgagaaggcaaaatccagcgccgtagagttctgcggcattgtctttaactctcccttcggagtgaacacaaagatttcggaagcaaacaggttcagtttgatcgtatccagaaaatctatcgcatccggttgcggatcatccagtatctctttaatggttttcagccatttctccagttcaccttcgtcttcgctgcctcctccttctttatatttccagtgggcggcaaagccttgttctgcaacatcgttcatccgttcgctgcgaatctgtacttcgatccattgtccgttgtttcccatcagggtgacgtgcaatgcctggtaaccattcgccttcggatggcttacccagtcgcgcaggcggtcgggatgaggcttgtatatcttggaaatggagacatagatgtcgaaacagtcgttgagttcttcttccacgttgcgtggttcgaagatgatacggacagcgagcaagtcataaatctcctcgaacgggacgtgcttggtttgcatcttgttccagatggagtagatcgatttcacacgtgccagaatccggtatttcagccccatcttatccagctgagtgcggatcggagctgtgaagtcgttgaatactttgtcgcgttcggcggcggtagcattcagcttttcttctatttcggcatattcttcggggtgttcgtatttgaaactgaggttttcaagctctgttttgatcttgtacagacctaggcggttggctaacggggcatagatgtagagagtttctcctgctatcttgtattgcttgttgggcagcatggaacccagcgtgcgcatattgtgcaagcggtcggctattttgatcaggataacccggatatcgttcgacatggtgagcagtaacttcttgaagttctctgcctgtgccgaagcgcggtcgccgaagattcctccggagattttggttagtccgtctacaatctgggcaatcttcggtccaaagatattttcgatgtcttctaccgtgtaatcagtgtcttctactacgtcgtgcagtagtgccgcacagatagaagtagaaccaagaccaatttcgttacatactatttgtgcaacggcaatcgggtgcatgatataaggttcgccagatcggcgtttgattcctttgtgtgcctgattagcgaagttgaaagcttttgtgatgatttcaactcgtttgcgatgtttagtatggagataatcattcagaagttcctggaacgcctgattgatcatctcttcatctgctatttctttgggggttatattatccatattcgttatcctttcattcgcttatttttgcaaaaataagcaaatttccgaatgaagcaagcgggaagtcatttatttgtagattttcaattgttttcctgctgcgattctagtgttcgacataccgttccactgctgtatatctttgacacgtacgcctagcttttcggcaatcgatgaaagagtgtctccactttttatcttataataagtcaattttcctttaccggccactgcacttgtctgtctgcgggtggttggagttacttctttcacggcaacggttttgcggttgcggaatagctcgtcagcacggtgtgcgtagatcgtatcttgcttgtcaataaacgtactgatggcgccttgtggtaaacgtaatgtacaaggtttggtcgtgccgggaatcacttgtttcttgtattggggattcaggctcttcacttcctccagcggaacattgcaaagttcggcaatctgctcgaaatgcaggtttttagtgacttgcaccgtatctgtgcttgccggaatgtttgtttccatcggacagatgttgtggtcgcaataatatgtcatcacgtagttggctgcaatgaaagcaggtacgtatccgcgtgtctctttgggcagcaggttatagattttccagtaatccgtttcgcctccggcgcggcggattgccttgttgatagtacctgggccgcagttataggctgcgataaccagattccagtctccataaatatcgtacatctctttcagataacgggcggcagcccaggttgctttgatcgggtcgcggcgttcatctatcagactattggattcaagaccgtaaatctttcctgtcccaatcatgaattgccacagtcccgaggcgccggcacgtgacacagccgaaggattcagtgcggattcgataatcggcaggtacttcagttccagaggaagtccgtaagcgtccagtgcttcttcaaaaataggcatatagaaattgcaggcgctcagcatgaatgaaacctgattgcgcaggcgacccgcgtacatatcgatgaatttgcgtacaatgtcattataaggcatctccatgacagccggaatacgtgaaaggcggtcaatgtagacagaatcactgaataaaggattcacttccgccgtactgcaatctttgcctaaatcaatatagtttttagctttccagtcgttcagcagactgtcgagcgggtaagtcatactctttggaagatcgatgctttctttgcgttcggttccgttttcacgaataactacatctacactttgagcttttacctgtgtggttgccaacaggaaaaggaaaataatcgaacaatagttttctaatttcttcatgctttaattataagttcaatctaaattgtgtttttaaaatcgtagtacgcattgcagtcccactgacttattcttgtaactgttggagcgaaactggctgttattgtcaatgacagttggctccagcttcatactcaagtcaggtgaaatgtcgaagtttgataattccgcatcgacataggcatcgatgatggaaataaggtatactccgataaatgcaaatatactaaggtcccgaaaacgacggaacgagtcctttcttcgtttcaaggtgtttttcagttgctcttcattatactgggcgttcggtggcagcaaatcttcatagctcttggtgtttggattactgtccatgatgtccagataggcctgtgaatagtctttatacattttcccgttccagctgagggcatacgcacatcctgcaaaccctccatatataataggtagtttccagtatttacggttgtaaatctgtcctccgccggggaatacgactgcaagccatgtcgctttggttgggttaggaatgaacagtttcttgttgagattctgcacaggaggtactgtgtcggttttcactacaataggtgtcggctgttctatcttcttcagttcttttttattggctgcgtcaaggctgtcggctatctgtattttggcagcagacagactgtcggttgcttgcaggcgttccggatgcaatatcttgatcgaatccttcttcagcgaatccatcacctgagcaggatcccggtgccttcgtgcacgtgctttcggtgcttcccggctctgaataatactgtctttctgtaccggagtcacaggttcttgtgcatacacatcaatccctgccacctgtagaaaacagagaagcagggtgatgatgagtaactgatatttcttactttttcttgtcatctacttttttagcgtatcgaagatttccatgatacgttccagttcctcctcgttgctgaaaggaatactgatttttcctttccccttttcggagcaagtcagttgtaccttggtgttgaaaaatcccgtgagttgttgctttagtaaattaaactcttccggtagtttactgcgtttcggagtgattttccgtgtgccgcttttcacagcttctccttcgctcagcgatttgacaatctcttctactttgcggacggagtatccgtgttcctgtatctcttcgaatatttttacttgaagtttggggtcgcctaatgaaatcaatgcacgtgcatgtcccatatccagctgtttgttttgcagagccatctgtataggagccggcagtttcagcagacgcaggtagttggcgatagtagtccggttcttgccgatacgttcgctcaggcgttcctgtgtcagttcatactggtccagcagatgttgataagccaatgctatttctaccgcattcaggtcttcacgctgtatgttttcaatcagcgccatttccatcatgttttcgtcgtcggcggtgcggatgtaggcagggatggttttcagtcctgctttttgtgaagcacggtaacgacgctctcccgcgatgatctgatactcatcgtccgagagtttgcgtagagtgataggctgtatgataccgatttccgcaatggagtcagccagttcctgcaaagccgtttgatcgaattcgcggcggggctgattggggttgacggtaatcttcgccaactctatttcactaatggaagaagaaccttcggttttcacatcatccattgagagcaaggcgtcaagtccgcgtcctaatgcatttcttttttgtgttgccatatcttcttcggttatttatttctgttgataatctctttggcaagggcgagatggtttttggcaccggtagagtccgcatcataaagaatggtcgggataccgtagctgggagcctcgctcagtttcacatttcgctggatcacactgttgaaaactaattcctgaaagtgtcttttcacttcgtcgtaaatctggtttgcctgacgcagacgtgagtcatacatcgtcagcaggaaaccttcgatttccagagcgggattcagtttcgacttgatgattttaattgtattcagcagtttgctgatgccttcgagagcaaaatactcagcttgcacggggatgatcacggagtcggctgccgtcagggcattgatggtgatcagtccgagtgaaggagaacaatctatcagaatatagtcatattctttcttcaagggtgtgagcacttctttcagtatcttttcgcggtttgggaggttcagcatttcaatctctgctcctacaagattgatgtgcgaagagatcactttcaaagagtcgatttctgtgtcaagaatagcgtcctgtacattggctctgtcaataatgcattcatagatagtgcattccgactgcttgatgtccactcccagaccggaagaggcatttgcttgcgggtcggcatctaccacgagtactttcttttcaagtgtagcaagtgacgctgcgagattaatcgtagtcgtggtctttcctacaccccctttttgattggccaaagcaattatttttcccatatactctaaatttattggcagcgaaataagtgataattccttagagcgcctacgaaaaaagagaaactttgcattttctgttgataagtcaccggttttgttaataactgccgggcgaaacagttccgaaacccggttgattttatcatcatactttctctgttcgagcttgcaaatatacatatttatattggatatctatttctttttttactcgcttgcagaagattaagatttgtaaacgggtgtatattcgtcagatagcgatgtgattaatatgatattcggagataagcggttggcagtacggttactttttgctacttttgtgcgaacattaaaaaggaaaggattgaatatatggaaagtaagaagccgttgatcctcgtttcgaatgacgatggtgttatggctaaaggtattagtgaactggtgaagttccttcgtccgttgggggaaattgttgtaatggcacccgactctccgcgctccggcagcggcagtgcattgacggtgactcatccggttcattatcaactggtcaaaagagaagtgggactgactgtatataaatgtacaggaacgccgaccgattgtatcaagctggcattgggctcagtgctcgaccggaagcctgacctgatcgtaggcggtatcaatcatggagataattccgctattaacgtgcattattcaggaacgatgggagtagtgattgaaggctgtctgaagggaattccttcgattggtttttctctgtgcaatcatcagcccgatgctgattttgaaccttcgggtccttatatacgcaagatagctgccatgatattggaaaaaggactgcccccgttgacttgtcttaatgtgaactttcccgatactcccgacctcaaaggagtgaaggtttgtgaacaggcaaagggatgctgggtgaatgaatgggtaacttgtccccgtcttgatgaccataattacttttggctgaccggttcattcaccgatcatgaacttgaaaatgagaacaatgatcattgggcgctggaaaacggatatgtggctatcacgccaacgacagtcgatatgactgcttacggctttatagatgaactgaatggctattgtcagcaactggaattctgacatacgcattgtgctgatttcaaatatcaaaactcctaattcaaaattcccatgaagtactatctgattgtcggtgaagcttccggagacttgcatgcgtcccatttgatgactgccctcaaggcggaagatcctcaggccgatttccgctttttcggtggagatttgatggctgccgtcggaggaacgatggtgaagcattataaagagctggcgtatatgggatttattccagtactgcttcatttgcgtacgatttttgcaaatatgaaacgttgcaaggaagatattgtggcgtggaatcccgatgtggtgatcttggtcgattatcccggtttcaatcttaacatagctaagtttgtgcatttcgagacgcagattcctgtcttctattatatttctccgaagatatgggcatggaaggagtaccgcataaagaatatcaaacgtgatgtggatgaacttttctccattcttccttttgaagtggagttttttgaagagaagcaccggtatcctatacattatgtaggaaatcctacggtagatgaagtggctgcttatcagaaagctcatcctaaaaatccggaagcattcttggcggataataatctggaggataaaccggtaatcgcactgttggcgggaagccggaaacaggagatcaaggataatctgccggatatgctgaaagctgcttctgcttttcccgattatcaactggtactggccggtgctcccggcatcgctccggagtattacaaacaatatgtagggcaggctaaagtgaaaataatctttgaccagacctatcgtttgctacaacatgcggaggcggctttggtcacttcgggtacggcgactcttgagacagccttgttccgtgttcctcaggtggtttgttactatacaccgattggaaaagtggtttcgtttttgcgtcgtcatatcttgaaagtgaaatttatctcactagtcaatctgattgcaaatcgtgaggttgtaaaggagttggttgcagatacaatgacagtcggaaatatgcagagtgaactaaagaaactgattgaagatcaggaatataaggatcgtatgcttgccgaatatgagtatatggcagctcggttggggcctgcaggtgctccccagcatgctgctcgcaaaatgcttgaactgttgaaaaaataactttctttttctgaataaacgtaaagccggtgcagtaaatgcccggcttttttatttatatagcagaagaattaaaaagagaggaataaatatgaaaaaatttaattggcttttagtaatgttattgctcgcattggtacctgtgctgcaatcatgtgacgacgatgggtactcaattggagacataggatgggattgggctacagttcgtgctaccggtggcggtggttattatctggaaggtgatcgttggggtatgattgatccggtggccagctctattccttggtacaaaccggtagacggtgaacgagtagttgcttttttcaatcctttggctgatacggataagggtgctcaggtaaagatcgaaggaattcaggaagtgttgacaaaagaagtggaagatatgacggctgaaaatgaagaggaattcggtaatgatcctatcgtgatttatcaaggagatatgtggctgggaggaaagtttctgaatatcatcttccatcagtatttgcctcgttctgaaaagcaccgcatcagtcttgtacagaataagatagaaccggaagctccggaaacaccggaagctttgaaggtggatgaagatgggtatatacatctggaattacgttacaatacgtatgatgatgtgactggataccggggatggggacgagtttcttataatctggaagagttctatccaacggcaaaagatgcagctgaaacagaatttaaaggattcaaggtgattattaattcagaagaaaatggagaaggaagagtgatcgttcttgatttggatcatccggtaggcgttccggaaaaagcgaaaaatgtgcattctacttcttttgttaaatagcaaaacttttataaataactaaacctaaaccttgacgaacactgtgtgtgaaaaaaaaggtcggaagtgcttcaaagcggcttccgacctttttattttatttattctgttattaaaaccaagtcagtgcatatagataaaagactgctgccggtatagccatcaaagcactgtcgaagcggtcgagcatccctccatgtcccggaagaatgtttcccgaatctttaacgtgcagctggcgtttcagtaatgattctgtcaggtcaccccatgttccgaaaacgacaacgactaaagccagacctgcccattcccacattgacataatcgtgaaataatgtgccaagacaaaagaagctccgatagctactactccgccaccgatggaaccttcccatgattttttaggagaaatacgttcaaacaagcggtgtttgccaattaatgaaccgacacaatatgcacccgtatcactcagccaaaggaatataaagatagacaatggcaggatcggattgtagcttacgctgctatattccggatcagtatgaaatgccaagacattgagcaaggcaaacggcaggcctatataaagctggctgagcatggaatatgcccagttaagcattggacttgcccttttcagatacagctcactgatcatcaaatagagtagcagcagcaaataaggaatgaaaatcttggagtcggctgcatcgatacagaatcccatcactgcgaggaacaagtaagctcctcccagcatgataatggttttgtttacattgactccttctgcgcggctgttgattaactgtccgaattcatagattgtcagtgcactgatcgccatgaacagaatgccgaagctgaaagaattatagagtatacatcccactaaaatggcaacaaagagtatacccgtaatggcccgttttataaaattactaatcaaaatcttcgtgttttaattatttagattcggtagtttgttcttcctcattggattttgcttctatagtaacttttccttctacggttactttttttccttccgcagtgattttcgtttctgtagttgcttcttcctgagcagaatttttagcttcctcttctttgatttcttgttcttctgctttcagtttctcggcaagttctctttccgctctggcagcgtcctggctttctttggcagccatgatttcttccgagcgggatgcccacgggcgtttaccgaaaatacgttcgacgtcttcggcaaagatcacttctttgtcgatcagtaactgagccagtttattgtgtccttccatatgttcggacaaaatcttcttggcacgttcatattgctcgttcaccatccgtttcacttcttcgtcgatgagttcggctgttttttcgctatatggacggttgaaagaatattcctcattattataatagcataagttgggtagtttgtcactcatacctaaataagcaatcatgccgtatgcctgtttcgtaactctttcgaggtcgttcatggcaccggtagagatgcgtccgatgaacagatcttcggctgcacgtcctccgagggtagcacacatttcatcaagcatttgctctttagtagtgatctgacgttcttccggcagataccaggcggcacccaatgcacgtccgcggggaacaatcgttactttgatcaatggatttgcgtattccagcaaccacgaaatagaggcgtgtcctgcttcatgcaaggcaatcgagcgtctttccgcttctgtagtaatcttggtcttcttttccagaccaccgatgatacggtctaccgcatccagaaaatcctgcttgcctacaaatttctttccgtgacgggctgcgatcagcgcagcttcattgcagacattcgcaatgtccgcaccggagaatcccggagtctgacgtgccagcaaatctacatctactgtatcgtctatcttgatcgggcgcaggtgtacgccgaatacttctttacgttcgttaaggtcgggcaggtctacgtgtatctgacggtcgaaacgtccggcacgaagtaatgccttgtcaagtacgtccacacggttggtagcggcaaggataatcacaccactattggaaccgaagccgtccatttcagtcagcaactgattcagagtgttttcacgctcatcatttccacccattgccgggttttttccacgagcacggcctaccgcgtcaatttcatcgataaagacaatacaaggagctttttctttagcctgcttgaacaagtcacgtacgcgggaagcacctacaccgacaaacatttctacgaagtcggaacctgccagtgagaagaacggaacgtttgcttcgccggcaacagccttggcaagcaaggtcttaccggtgcccggagggcctacgagcaatgcgcctttgggaatcttacctcccaggtcagtatacttctgaggttctttcagaaactctacgatttcttctacttcctgttttgcttccgccaggccggctacatccttgaatgtaatcttgatggagcctcccttttcgaaaagctgggctttggattttcctacattgaatacaccgccggcaccaccgccgccaccgccgctcatacggcgcatgaagaatatccatagggcgattaataaaaccagtggaagaatattaatcaggattgccgggaaaatatccgaatcggcagggtaatctgcgattccgtcaaaatgaccggctgctttttcgtcctgcagaaatttatccagtctgtccttggaaggagggttactggtgataatcgggtttcttcccactttggtggagtccgcaccgaatattgcacctacggcattcggcttgacatgggcttcgagagttttctcagagcccagtactttgctgatgtagccgttagtgacatacttctggaagtcgctgtaaggaacgactttacttccgcttcctcttgaatcgctgctccaccaaaggccgagaagcatgagggcaataatcatatatagccagttcagattgaacttgggcatattcaccttattattaggcttattgttattgttgttagtattattgttgtccataattgtggattagtctaaatcggggatttgagtaagtttggcgtcagcccacagatgttcaagattatagaaggatcttacttccggcagaaagacatgtacaagtacatcggaataatccattgccacccattctgcatttcgaagtccgtcgattgcggtcggtttgctgtctgcacctttacgggcaaactccttgacagagtctacaatagcatttacctgactaggggagtttccctggcatataacgaaatatttgcagatggtatcttctatactggttaaatcagcaataatgatgtttttaccttttttttcctgaattccctctttaattttttcaattaatattttcgtatcgttcattcctgtaattgaaattaataattcatgttctcttttggtttataacaaaaaaggattaccctttgtttctgattataaacgtgatatttttgacaaatatacggtgatttattggatacaagaaagttatgacttaatttttgtgttttttaggggagatgcttttacttgaaggagcaaaatgagagtttttgcaaaaaaaatagcagaaatgtttgcaattcccaaattatttgtatctttgcacccgcaaacgaaaatcattgggctatggtgtaatggtaacactacagattctggtcctgtcattcctggttcgaatccaggtagcccaacaagatcaacgtcaatgatgaatacgaaaatcccgctaaaatgaaagttttagcgggatttttgttttttgcggtatacttttatagctggtaaggctcaaaaaaagagtcttccaaaatgaatggaaaactctttttacattagcaccgtttaggtgatgttttttgcatctatgatgggatacctattgtgtctgtgttgtgacgtttggctgttaccatcccggattctgaacaagtttgctcgacttctgaatctcgtttaacgggataggatagaggtacatgcgtctttcaaaaatacgggtttcaaatgcggtacgctccataaagtcctccaggttatcagcgttcatattcatgccatgtactggtccgccttgcttatatccttcttcatcggcacacatccagcgacggacgtcgaaatagcgttgcccttcggcaaatagttcgatccggcgttctttgcgtatggcttcttcctgcaaagtttgattgccttttatttcaggcttgatgtccttcaataaagggatacctgctctgtagcggacgctgtcgatgtgtgcaatgatacgctcatctgaagggtttacatgattcaatgcctcggcatatagtaaatagaagtcggcgagacggaacagcattcctgccctgtactttgacttggcattgcttccttggtttaaaagatcacggttcattcctttataaagcagatagccggagtagctcatatccgctttggagttatcgtctccgctgcctttatagaaataaatctgtttcgttgttttttgccatgtcttgccggagtaagttatgtcctgataaaaacgtggttctcgattcttatacatattaggaatgccatcttcaccaatgccttcttctgaataaagtcctgactcgtgaatactcttgccgtcattcatgaagaaatcgtcaatagcttcctgcaatacacctacacaaccgaatccgctatatatggcacgtggagtgcatctgcgttctcttccttctccacctacatcgccccatgaattcttgctggtttgccagatagcttccgggttgttcaaacttacctgaaagagttggtatagagattcttctgcattcaactctccatctttatctttttctttataaaggtgatagtgagtttttgcataatcaatgaagcgctgcaacgcgtttaaggcagtttgccattttttgtcatctttcgcaggaaacagttgtttgtcctgattatccctcaatgcgattgcttccgaatatcctccgttaagtaaggggcttgcggcatacacgtggagttttgccagaatagccaatgctgcccctttggtaggtgctgcgcttcggttctcgtttggagttccgtcatcattcacttccttttcaggcagctcattgtagcattcattgagttcggaatcgatgaattgcactacttcgtcgacagagttccggtaatagtccagatcacttgcggacggttccgatatttctgtcataatggggatagggccatacaattcgaataacaagtagtgatagtaagcacgtaggaaacgggcttcgtttttcaatcttgccaattcgtcttcgtcaatgtaatccgtcacgtcgccttgctgtgggatcgtatgcgagtatgccagaaattcgtttgcctgacggatttgtttgtaaagactccagcgcgataaatccgccgatccggcatggtaacctactgtcggaattgtcttgacattattttgtgcactttttaactcgtcggaaactgccggccaaggattatctaatcctgtcaaacctgcataagcgctggttataataatgtttgatacatccggaattccggaatatatatatcggtggaagcgacgggcataaccggtattattgaatacttcttccatgcttaattctgccgccaggtcgtccgatacatccagataatcgctgcaacccgaaaagaataccgtgcttagtcctacggctactatgattgatagttttttcaatgtcttcatatatataatgtattatatgtattattagaaagtaaagtcaagaccgaatgtgaaagtccggctcagtggatatgagaagccgccgttggtgtttccaagttccgggtcccacattttgatatcatcccatacacaaagattgtttccttgcagataaacacgcaaagcttgtataccgatttttttcagtgttttctccttgaagttgtaaccgacttcaatatttttcagtcgcaggaaactggcattgcgcagccaccaagtgctggcagctgtattgttgtcataattggtagagtgcatgcgggggaacattacattttggcttgggttctgttccgtccatctgttggctacttctgatcgtacagcggattcttcgactccccattggaacgggaaaaatgctccgtccgagctggctcctaatacggtcgatgtatttcctgatccttggaagaagataccgacatagactcctttccattcggcattgaggccgaagccataaactatttccggaacggaaggatttcctacatcttccatctggtcgttgctgtcgatcttaccgtctccattcaggtctttgtatttgatatctcccggacgtactccgcttgacaagccggatacaactcccggtttcagttcatactggcggttcagaccttcacctgttatgttgaagtcgtcggcggtataaagtccgtcagcaatgtatagtttccatgagttgagtcgtgtccctttcttttcgagccacggatagacttgtggcacttggtcatattcgagaatttcgttgcgtgcaaatgtaaagttgccgcgtgcgcttaggtttacttcacctactttataattgagattcagacttgcatccacaccttggtttttcacgataccgaagttttgccatggcatttgctggaagcctgtcacattggaaacggtattacgttgcaataggatgtccttacgtttgttgttgaagtagtccacttgcaggtcaatgcggttgtcgaataaccccaagtcgataccgaagttgcgtttgtcttcgatttcccaggaaagaaacggtgattcgaactgggcttcggtaattccattgcctactccgcctaatgcgccgctgttgctgaatccgatattatagccgctattatcctgtttcatggttccacgatataagaagcggttgccgccggtatcgtcgttaccggtacgaccgatggagaatcttaatttcaatttgcttactacttttttcaaggcttccggataataatgttcattgctgatataccatgccaaacccatggcggggaagaaaccgaagcgatagccttttgcaaaggtttccgaaccggtgtagccgaagttaccttctaagaaatagcgtccgtcatatccataagttacacgacctaccaaaccttgctttctataaggtaaagcgttattgtgatactgtgtttctttttgcatgtataggaacatggcccctacatcgtgtttctctgcaaatgtacggttgtaattgaaggctgtttcaaagtaaatctttttgtttgaactgttactcaggttttctgatagtacatcgctgccttctactacagtcttatataacagtttgccattttcgtcgcgtcctgtggctagatattgtgtcggtgttttggtacgtttggcgatatatgacatgtctgcgtcaaagctgataagtcctttccatgtcaatcccttggtcaggaagtccagcttctggtctacttccactttcgactggatggaagttctccattctttggcgtatcctgagttaacaagctggttgtacgggttagaacggttgcctgacggacggggatgtccggccacagtcccgtcggaataaactgccggcatgatataagacggagtacggcacatggtagtaaaaatagtgctggttcctgttcccggataattggtttgcaggtattgtccgctgaggtctacttttactgttgtggttttagttgcgtcaaagtcaatgttgctgcgcagattgtagcgcttcaatccgatattgttatcatagtcattgccgaaatccttgaatataccattttcctgatagaaggcgccggatacgaagtaacgggcacgttcagttcctcctcttacgttcagggtataccgcatattgtaggtatggtttcttaacatggtacccaaccagtcggtgtccggatataaatcacggtcggctccgggaccgtatttggctatctcttcgtctgtgcgtatgctggcggttccttcgttgttcaatgcttcgttgtataggttcaacgtttctactgagttcatgaaagtaggcaggcgtgttggctcgagaatagttccttcggctcggaaagagattttaggtttctgtgaatttcctcgtttggaagtaatcaagataactccatttgcgccttcggctccgtaaacggccgtggcggcagcatctttcagtaaggtaaatgattcaatttcatctgcttcaatatcctgcatttgccgggggacaccgtcgactaatacaagcggattggtacctcctttgaaagaactttgtccccgaatccagaagtcggcattgtcgtatcccggttctccggaacgttgtactgcgatcaatcccggtacttgccctgccagattattggtcatattacggctggaagaaacggacaattccttggggccgatggcgttgatggaactcactacgctgttcttcttttgttttccgtagccgataacaaccacgtcctccagcatctctgtgctcggaagcattttgattgctaataccttttctcctttataagtgattttttgctgttcgtaacccacataagagaaaagaagtatattgcctttttgggctttgatggtgaaattaccatctacgtcagtgatggcgccgactgtggttccttcgatttttatctgcactccgatcatcggttgcccgttttcatcgactacgagtcctgttggactttgtccttgtgcataaattgtgtttattcctgcaaataaggcaaacagaatgaaacacattacttttaatgtcttattcataaatgtttcttttaagtaagaattagaaaataattaaggttacttgtccgtgccgtatacatatatttctgccagatgtcctacagacgaaccactgcccagagtggggatgtaaagacgtatccagcgtgcgtcacatgcttttacggggaccatttgctctgtttttatgctaccgtcaaagaagtattttccaatcaggttccatgtttcaccgtcatctcctgcataaatctcaagattcatagaagtaagtgcattttgtctggcgatgagtcctaattggctgacactgttttctttgcccatgtcgagtattatttcatatggtggagctacttcgcctccctgccatttactatgccagaaagtgtttatctctccgtcaatcaaagatatcgtctgaccgttgtgggggtaagcggctgaaacttcgcctgtcttttcttccgtgttggcagtcactgtccagtggtcacggttaatagggccgccttgtttgattacgaaatagttggctaccgtttccttgtctatgttgatgctggcatctccttggccgctaagtccgctgagtgaaaccggaagaagataatttccggggggaagtgtttcacccagcaggctaatagcagagcctcccgttgtctttcccttggcgatagtgacatcgggaagagtgtagaagtcggaaggtaaaggtatgtaataggtcgaatttgccgaattgtagttgtccacatagtctgctcctttggttgcaaacgaggtcgtcagatcccattcgttctcaaagcttatctctgtgtcgagattcattggtgaagtagtcgttcctccttcaacgacgaagtctcctccggtagatgcaagtctgacgatggcttctttaacgataaatccgtaaagcgttgccgtccggtcggagttcataggagtccctgtagaggatacccgtaatggaagaacgtatttaagttcatcaaagccgcacaggttgtagattttgtgaggatcatacaccagactgcctcctgttacacgcctgtctccgccaggagagacggaataggttgcattttcaatcgtatagcattcgggaggtagtaattgataggaagtgccgtccgcattattcagagaatccaacagggattgttctactgaaaaagtcaccgttcctccggtatcttctaatcctgccttggcaatggataaatcaatcttgttgagagggcctaaatcataaacttcaatggtggagaatccactttgtgatgctgagaacattcccttagaacgttcgttatcaacatcttctacgcagctggtaatgcataagaatgccagcaagcatggtgttaattcaaagcattttttcataaattaatattagttttattaaaggtaaaaagggtaaaaacaagttgaagtacttgtgggtactcttggatttggaatacttatttctttctcataggcattaaaattagaagttaaaacttttatttgcgtgctgaactatgctgatttaaagtcaaaaaaataataggttctatgtcttagttctggtagaactataatatagtagatgataagagagaataagatatatattattgatattcaatggataatgttggattttgtaaaggcgcaataaggaaattacgactcggtttctacccattgattgattaaatgagaattagtaagaaacttatttgtaattttaatctgaaatattattgctaaatagtatggttttttcgaactaattagtatatttgcgcacgaatcgttgatttttagcaaaaaagatggtaaatctattgcttagctagatacgttaatgtagatacgagcggattaacagactgttttttatgctaagttctaccagaacttagttgaattgttcctctattccttttaattggttgaatgcttcggtcagacgggcgaaaaactcactttttaaatataaagcattttggcagtcgtttaattacgggtgtaagggagaaaatatttagttgctatttggatagtacacagcgtgataaaggttgctatattctcaaagagttctcatgcctttgagaaaaaattctcaccacactgagaaaaaattctcaatgcaatgagaaaattttctcaaagccatgagtattttttctcagtgcagtgagaatataatgaaagcttcaataaaaaagccaactaaatccctaatgggttagttggcttttatatgagaggattttatcctttgtttcgggaaaatttattcttccgctttcaatgattcgtcgataaccttgattttctgtaataccagttcaaggtcagctttcagtttatccacttttcgattcagttcagtcagcaggctgctacctttcttggaagaagaagtaaggaatcccaggttattttcataagtctgaagttcattcttcatattctcataaatacgtaccagtttctcccgttctctatataaagactgagaacctcctccttggatattgctgatgtttgaacggaaattgcttaatttcttgttggatgcactgatgttgaaacggtcaaacagttgatcgatcaagccatgatattgcttatacaatttatctttctccttgaacggaacatgaccgatggaattccattccttcatcagttcgcgtaccaaagtgctggcttcgtcagtatccatgttttcatcgattgaagctaatttttcaatcaacgctttcttcttctccatgttctctacttctacagaacgttgtgaagaagtagccttgtttttctggtcgaagaaatagtcacaagcagtgatgaaacgtttccatacggcatccgagtatttcttggctaccggaccgattgttttccactctttctgcaatttggtcagtgcatcagcggttgctttccagtcagtgctgtccttcagtgcttctgctttttcgcaaagtgctttcttcttttccagattctcgttcattccctctttcagagccttgaagaattctcctttctttttgaagaagtcatcgcaggcatgacggaagcgttcgaatatcttcacgttcatcttttggggagcgaatccgattgtcttccatttgttttgtagagcaatcacttcctgtgtcttgttttcccaagccgagaatgttttcagttcatcatactcgattgcttctacaatttcgcaaatgacagttttttgatccagattgtgctgttccgattctttcagcgcttcgaaatgttgctggtgacggcggtttacagccgtagaagcagccttgaagcggttccagatttcgtcacgcaattctttagccaccggacccgtatcacggaattcctgatgcagcttctgaagctggtggaaagcggaaactacatcttcctcgtcagccagcttttcggctgcctcgcaaagatgagtcttgatctccagattcttcttgaagtcgtattcacgaaattcgttgttcagtttcagcaaatcgtagaatttctctacgtacagttggtaattcttccaaagttcattcaccttgccttgcggaaccagtttggtttcgttccattgctgttgcagctttttgaactccgtataagatttattggcatcatcacccgattctaccagttctttaagttcttcgataatggaaagcttgacttgcagattttcttctttctgacgttcctgttcggctacaagttgacttcttttctctttgattgatcccatgaggcgtttgaattcctcttctgtcggatcatccttcggaatgaagtcttcggcagcgcctccgttgtcgataaattgctttttagcagcctccaactcggcgttgtgtaacttgtagaatgattgttttagattgtcaatttcctgcttgtttgcgttttccgagtcttgcgcaagctctttcaatcggttcagtacgtcttcctttgtggcaggtttaggtgctgcttcagtctgaacttcggcagtaacttcttcagtaactttttcggtaccttcttcagtcggagtctctgtaatggcttcagaaacctcaactgttttcttttcttcttctaactccccttggttcaagggaagattagtgtcatgagcgtccatcattgtatattagttttgggtcacaaaataatgaaataaaacgattacttcatactcttttgcttatttttttttgattatcgtgtttttatgataataaaacagtaattcccatgtacagcatcatgccgattatgtcatttgtgatggctataaacggacctgttgcgatggcgggatctatttttagtttctccagtgtcatcgggaccagtgtgccgaagatggaggcgaacatcactacggcaaacaggctgatggatacggaataagtaaccgtggccgtcgcaccgaaccggataaagttgtaagtatataccagcagggagatgatggtagcattgattaaggctactaccgcttccttggtcacttgcttgaaagtgtttttggcgtccagcgaactgttggcaagcccttgtacgatgatagcggaagactgtgtaccgacgtttcctcctgtaccaccgatcagcgggatatataatgccatttcggggtgggcggcgaaggtagcgtcgaaatttcccaatatcatggagtttccgattcctccgatcatgccgatcagcagccacggcagtcgggctgtggtctgtcttagtacgttatcgtcggtttctacgtcctgcgaaagaccggatgccaactggtaatcacgttccgactgttcacgaacttcgtccatgacgtcgtcgacggtaatctgtcctatcagtcggccgatgctatccaccacggggatggcaacaaggtcatacttttcgatggtttgcgccacttcgtcgatggaagtgtctacgtgtaccgagatcgggtctttctgcatcacgtgtttcactttggagacagaaggggaggtgatcatcttcttgagcgggaagattcctctcaggcgttcatcgtcgtcaatgacatatacataatatatttcgtccagttcttcggcttgctggcgcatttccttcagacactcgggcatactccagttctcgttcacgactaccatttcggtgcccatcagaccaccggcggtgttttcgtcgtatttcaagaggtctacgatgtctcccgcctgttcgatgtcttcgatgtgcgaaagaatttcttcctgtttgtcttcgtcaaggtcacgcatcaggtctacggcatcatccgtgtccatgtagtccacaaagcgcttggcgattgtttccgaagggatcatttcgaggaactctttacgaacgtcctcatccatttcgacaagtacgtcggccgcggtttcattgttgagcaggcggtagacaaaccgggcttcttccgggttcaggtcatcacacagctcagcgatgtcggcgggatgaaggtcgacaagaagttctttaaccttatcggcatctttttgctcgataaggtgttttacgttgtcaatgtattcctcgttcatctttttgtttacgattaaacgttttacaaattacgggtttcgctcactatcggtcagttaccggatggtgtggctgttttcagtgcttcttccacttggttggtcagactgatgaattcttctaccgacagctgttccgggcgcttgttgaataatgcatcctctgtcagcgggcagtctttgcctaaaatcggcttgatagagttgcgcaatgttttacgccgttggttgaaggtggtcttcactacttgcttgaacagtttttcgtcgcatcccagttccttggtatcattgcgggtcatgcggatgacggcgcttttcactttggggggcgggttgaaaacatgttcgctgacggtaaagagatattctactttataccatgcctgtatcagtacgctcaggatgccgtaggttttgctgcccggtccggcggcgatacgttcggccacttctttctgtatcattccggtacagcaggggatgatgtccttgttttccagcatcttgaaaaatatctggctggagatgttgtacgggtaattaccggtcagtacgaaaggctttccgtcgaacagccggtgaaggttcattttcagaaaatcgtcttcgataatgtgatcttccagtgacggataggcttcacggagataggcaaccgattcatagtccacttcaacgacttttaccaaccggtctttttttaccagaaactgggtcaatactcccatacccggtcctacctccaatacaggcagttcggggaaggtgtcgactgtatcggcaatatcctgcgctactttcagatctttcagaaagtgctgtccgagaaactttttaggctttactaatttcatttaccaactaaataattacttttgcagccgacaaaggtaattcttttaaatgaagaatgaagaattaaggatgaagaaactactaaaaaagacgctgaagctgatattaccgatcgttttaggcggctttattctatactgggtttatcgcgactttgatttcagcagagtcggcgaggtattacggcatggcacgaactggtggtggatgctcttttcgctcttgttcggggtgcttgctcaggtatttcgcgggtggcggtggcggcagacgctggagccgctggatgctttcccaaaaagaagtgactgtgtgaatgccatctttatttcttatgccgccagtctggtcgttccccggataggagaggtgagccgttgcggggtgttggcgaagtacgataatgtttcctttgccaaatcgctggggacagtggtgacggagcggctggtagatacattgaccattcttctgattaccgtcattaccgtattgctgcaaatgcctgtgtttgtcactttcctcgaaaatacaggaaccaagataccttcttttacctatctcttgacttcggtctggttttatatcgtcttgttttgttttatcggggtggtggtacttctttattatttaaggaagacgctgtttttctataaacgggtgaaaggctttgtactgaatatttgggaaggaatcatgtctttgaaaggagtacgcaatattcctttgttcatattttatacattggccatctgggcttgttatttttttcatttctattttacgttctattgctttgcattcactgctcatttggacatccttgcggcactggtaatgtttgtaggtggtacgtttgctgttattgtgccgactcccaacggggcgggaccgtggcattttgctatcatggagatgatgatgctttacggagtaaatgtgacggatgccggaatatttgctctaattgtgcacggtattcaaacttttttggtagttttgttgggtgtatatggtttggcggctttgccgtttaccaatagacagcgaaagtaatcacttaataaaaatagatttgttatgagtactattctttctttagctccacagaatgtgtggaagcatttttattcgttgactcagattccccgtccgtccggacacatggagaaagtgactgaatttctgattaacttcggaaaaggcctgggactggaatctttcgtagacgaagcgggtaatgtgattatccgtaaaccggcaactccgggcatggaaaaccggaaaggtgtaattcttcaggcacacatggatatggttcctcagaagaataatgatacggttcatgattttgaaaaagatcctatcgaaacttatatagacggtgactgggtaaaagccaaaggtactacgctgggcgctgataacggactgggtgtagctgctatcatggctgtactggaagcaaaggatctgaaacacggtccgctggaagcattgatcactaaagatgaagaaaccggtatgtacggtgcattcggcttgaaaccgggtacggtaaacggagaaatcctgctgaatcttgactctgaggacgaaggagaactgtatatcggttgtgccggcggtatggatgtaactgctacgctggaatataaggaaatagctcccgaagaaggcgacgttgctgttaaagtaagcctgaaaggtttgcgtggcggacactccggattggaaatcaatgaaggacgcgccaatgccaataaactgttggtacgtttcgtacgtgaagcggttgccagctatgaagcccgcctggtaagctgggacggtggtaatatgcgcaatgcgattcctcgtgaagcatgtgcggtacttgccattcctgctgaaaacgaagaggaactgctgggcttggtgaaatattgcgaagacttgttcaatgaagagttctctgcaatcgaaactccgattagctttacggcagaacgtgtggaactgcctgccggtgaagtgcccgaagaaattcaggataatctgattgatgccatctttgcttgtcagaatggtgtgactcgtatgattccgaccgttcccgatacggtggaaacatcttctaatctggctatcattacgataggcggcggtaaggctgaaattaagattctggcccgtagctccagcgatagcatgaaagagtatctgactaccagtcttgagtcttgcttctctatggcaggtatgaaggtggaaatgactggcggctattcaggatggcagccgaacgttgaatcacctattttgcatgcgatgaaggaatcttataaacagcagtttggagtagaacccgctgtgaaagtaatccatgcaggtttggaatgcggtattatcggtgctatcattccggggctggatatgatttcgtttggtcctacattgcgctcaccgcactcaccggatgaaagagctttgattcctaccgtacagaagttctatgacttcctggtggctaccttagcacagactccgacgaaataagatttcttttcctattatatataggtataatacagtaaaaaggcacggaagacatcttccgtacctttttgtcatatttactgccattgatattacaattctgtctcataacaaataaattaattgatgcaaatcaattaatatgctataaaacataaaattctttcctttttcggctcaatctataaacaatggtcgtatttttgtgttataaaacatgtaattaggaggataacaaaatgaaaaagttagaaagattgtttagaaagatcggcaatgccgatgtacatgtttggggatactcaacacttggcatactccccaaagagaagatttaagttttttagttttcaggtattagtaattttaaaggtttaaagattatggcaaagaaaatgagttcattaattagaaaaatcctcagtgaagtaggtcgcaacgaaatgctttcatgggggtacagaattgaaaaatgagattcagtacattaactaagcttgagtggggatgcgttattgaaaacgttatccccacttttttattctgtcatttaggctggatagtggctaatccgcgttctttatctttctgttttccatgtgccgatagttcttgtcgcactatcaaagtttacccccacttttattattttccagtctcccacctgatagggaatggcatatcccttgctattaatctgcgccaatgcttcttccggtgtaccgtccactttaaattcaaagacataaagggtatcttgtaattttacaatggcgtcagcccttccgatagctgtatctacttccacatctatatattgtcccatcagcctgaaaaatagatagaagatggtttggtaatgtttctcttccttattatttagcttattagggatagaagcgaagaaggacttcagtctttccaagcattcatccaaatttccggcacgtaagtctttaataaatgatactatataaaatgtattctctcgtgcgggtaaatgcacataagcaggcatgagagattcgagaaatcctttcctgacctccttgttggggtaagctagtgtatagagctgaaaactcgggtcatatcctttaatagtgagatagccgctttgataaagtactggaagagggtcggtaattctattagtgggagcatcaaattgttctgctgtagcagtagtgtcgtccaactcacggatatcaaagttactttcttgcaggagatctatcaaaaaagtgggagtaccggtagaaaaccaaaaattggaatacttcttttgtgcgaaagcattgaacaggctgaatggattataaatatcctcgctattttcactaaaatgatatccgtcatattgttgtttcagatgagtacaagcttcttcatatgtttcgttattggcttgagccatctgttcaatatcgatttgcagtgtgtgtacctcttgttcggtaatgccgcatatagcgctatattcatcccacatactaatattttgcaagttattcagttcgctaaagatactcatttgactgaatttgctgatacctgtgataaaaaggaaacggatatattggccttgcgctttcaaagggctgaagaaatcgcgcataatatcacgaatttccatttgcaattccgtattgttattactgtccagcatgggagcgtcatattcatctacaagtatcacaaccggcttgccggtctgtgtatatgcgcgttgtataatcccctttaagcgaaggctgaaagtcgtttctccttcttcgcgtccatataatttctcccattgcagtaactggtaattaatgacggctgctaacgcttcggcagtcatatatttactcacactgaaatcaatatgtagcaccggataaaccgcccattctttttccagagtttccattgccaatccatcgaacaagtctttctttccggaaaaataagcttcgagtgtagacactagcagacttttcccgaatcgtcggggacggcttaaaaaataaaccttatttgtgtttgtcaaacggtaaattaactccgttttatcaacatacacataaccattatttcgcaaatcttcgaaattctgtattcctatcgggtatcgtctgaatctcttgtccatctaaattacgtttttatatgaaacatagacaaagatagaactaaataggggaaaatcaaagatcaaaaagtatattgttgtcttcttccattgttattttcgtatttcttttcacataacatattctttgtgtcttcccatattacgatacgttcttttagctcctcacctgttttatttctgtttgtgtatatatcggtcttatggtgaaaaaaggatcttccttaaaaaaagaatatttaaacagtcaggaagacgctaattacaacatcatataaatatagaatgaaaaagttccggcatttgtaactttgatatttactccttgtatgaattggatagttttgcgattaaactgaagcaattttgatcttaaactgattatttggtaactttattgaattttgatgattcattatgttattgttgtcatgtctgctgttgttgataaactagagaaaaatagcttcccgataccttttttattactttttcgccggtgataagcaagttcctcggtgaggaaagagtcgttggtttaaaaccaacggtcctttggttttaaaccaacgaaggctttgttagttagaaaagatgtatattttacgtacctttatgtggttttggcctatatttctgcatattattgcacttatttatgcgatttatttgctggctcactattttttgatcaactgatttcttgatataatcttaaaaatcgaacattactacgaactaattgcatgagatgggccaagcaactcagtcttcacgtttttttgtttatagttctttgataataagttcttctcccaaaaaagttggtaaaatgttggcacattcgttgtgtttcgtcttattgcgtcttctcttcttcaaatttggcatcagatgagataagtcaattattgaattttaattgaaaaagaataaatctttaaactttatttctttactttgttatttatacaaagaggatatatcaaacttaaactggaaagattatgaaaataaagcagatttgtatgctggtactgttatggttgggagtgattccggcggtgcaggctcagacgttcgacaaattatggaaacaagtggagcaggcggaaaagaagagtctgcctcagacagtgataaagctgacaggagagatttatcagaaaggagaggcggaaaagaactccccacaaatgctgaaagcgtatatgtggcgaatgaagtatcgggatatgctgactcctgacagcctttatacaaatgtaaaagagttggaacaatgggcaaagcaggcagataaaccgatggaccgggctatattgcattcattgattgcaggaatttatgcgaattacgccgctaataaccaatggcaactccggcagcggacagagattgtaggcgaagctccttcggcagatatgcgggagtggacagcaaatatgtttgtagaaaaagtcaaaacaagtattaaagaagcgatggcagactccgtgctattactcaatacttcttcacgcacttatattccttttgtggaactgggtgaaaccagtgaatattatcatcatgatatgtatcatttgctggctttccgcagcattgaggcattgcagcagatagaaggactggatcgtgccactccggtagaagcttattcggaggatacttcctctaaaaagcaatctccggtaaaacaggatattgaacgtatatatgaaaatatgctcacttcttataaagccaaaggggataaggagggatgtttgctgacgaatttgaattatctgagttggaagcgtgatagttcgaagagttttcgtgagcctttcagtgtgaagaaaggcggtacttatatgatgacggttgatccttatgaaacaggtttggatgcactgaaaaccgagtataagtcatcggatctttgtgctgaagtttatttggctcaggccaattatatgattgggaaagaacagcaaaccgttgctttgcaactttgtgatgagtcgatccgtttatatcccggttatcgtagaataaatgcgttgaagaatcttcgcgaagacatcctgtcgccgtctctgaatgtgaccgcggctgcaacagcttttcccggtgaagaaatcaagataagagcctcgcacaagaatctggacggattcacacttcgtcttttccaggcaaagaaattgatcaaggagcagcattttgcagtcctgcgtccggaagattatcggacacaggatacggtgtttacattccaggcaccggaagttggagaatatgtcatgcgtatcattccggatattcgtgcaaagagagacagtgaaagcaaattcaatgttacacgtttcaaggcattgacttgccgtttgccgggaaatcaatatgaagtagtgacactggacggacagacgggacatcctataccgaatgcgaaagtaactctttatacaaatgacgaaaagttattgcaggaatttacgacggggacggatggaaaagttgtattcccctggaaatccgattatagatatttgaaggctgccaaaggcgccgataccgctatgccgcttcaaggtgtctatggcggaagttatggatattacggagatgaaaataaggctttggaacaaatgaccttgttgacagaccgttccttgtatcgtcccggacagactgtatatgtgaaaggaatcgcttatacgcagaaagcggatacggcaaatgtgcttcccaataaggaatataccgtgatattgacagatgcgaataatcaggaagtcggacagaaaaaggtccgcacgaatgagttcgggtcatttgccactgattttgcgctgccttctgcctgtctgaacggaatgttctcgttgatagtcggaaatagcaggacaagtattcgtgtggaagattataagcgtccgacattcgatataacttttgagaaacaggcgggaagttatcaactgggagatcagatagaagtaaaaggtaagatacagtcttatagcggcgttttattgcaggatcttcctgtgaagtataccgtgaaacgttcagcctttagcctgtggcggtttgcggaaagcacgcagattgcttccggtgaggtgactgccaatgagaacggagaatttacaataccggttcgtctcgaagaaaatgatgtttataagaatcatgccagagtatactaccgctattcggtagaagccactgcaaccaatgtggcgggtgaaacgcagtcgtctacagatgtgatctctgcgggcaatcgttcgttggttttacagacggaattgagtgataagatttgcaaggataagccgttccatacggtattcaaggtacagaatctgaatgggcagcctgttgaagtgaagggcacattcttcttgtatcaggccaaagatgccgacttcaagaagctggacgagaaacctgttgcgacaggcacattcacttccaacgaagagatgacgattcattggggaaacctgccttccggaccttatgtgctgaaagcagtcgtcaaagacggacagggcaaggaagtaacggctgatgcgaatacgattcttttcgcttgggaagataaacgtccgcctgttgaaacgcccgtatggttctatgaggcgaatacagagtttgatgcaacgcatccggcaaagttctgcttcggaacttcggagaaagatgcttatgtgatgatgaatgtattctccggcaacgagttgctggaaagcaaagttatgaatttgtccgatacgatagtacatttttactatccgtataaggaaagttatggggacggagtcttcatcaacttctgtctggtaagagacggacaggtatatcaggaacaggtccggttaaagaaacgtctgccggacaagacattgaccatgaaatgggaagtattccgcgataaactgcgtcccggacaaaaggaagaatggaaactgacgattcatactccgcaagggcaggctgctgaagcggaaatgttggctacgatgtatgatgcctcgttggataagatatggaatagaaaacagaattttagtatttactataatcagatcatcccttattccaattggatgagtggatatttcggtaataactccttcaactactggtggaatcataaataccttaaagtgccggcaatggaatttgaccattttgtgacacagggaatgggttcaatagaagaagcattaaacggaagggttccgggagtaatggtcagaggatatggcgtgcagaaacaggcggcaatgacggggaatattatgatacggggtgtatcaagcagaagtaaagcagaagtaaaatatgttggaagtgttgctgaggatatggagctgtctgctgatcgtgcagaggcaggcaagccggacggcgcatccgaggaagaaacccttcccgaagctcccgccgacctgcgtacgaaccttgcggaaacagccttcttctacccgcaacttcgtaccaatgaacaaggcgaagtttccttctccttcactatgcccgaaagcctgacccgctggaacttccgtggctattctcataccaaaggtatgctgatgggcacactggacggtgaagccactacaagcaaagaatttatgctgactcctaatctgcctcgtttcgtacgtgtcggagataagacatctgttgccgcctccatttccaacatgaccggaaagccgcaggccggtacggtgagcatgattctctttgatccgatgacggaaaaggtaatcagcacacagaaacagaagtttaccgtagaggccggaaagacaatcggcgtcagcttcatgtttaccgtgagtgataaatacgagatactgggatgccggatgatagccgacagcggtaccttcagcgatggcgaacagcagttacttccggtgctcagcaataaagagcatctggtagaaacgcttccgatgcctgtccgtggagaagaaacacgtactttctctctcgacagcctgttcaatcatcacagtaagacggcaaccgaccgtaaactaaccattgaatttaccggaaatcctgcctggtatgctattcaggcattgccttcattgagccttccggaaaataataatgccatttcgtgggctaccgcttactacgcaaatacactggcttcctacagcatgaacagccagccgcgtataaaagccgtattcgatagctggaagctacagggtggaacaaaggataccttcctgagcaacctgcaaaagaaccaggaagtgaagaatatcctgttatccgaatctccgtgggtactcgaagcgcaaacagaagaacagcagaaagaacgtatcgccactctgttcgatctgaacaatatccgtagcaacaacattgccgcattgacaagattgcaggaattgcagaattcaagcggagcatggtcgtggtataaaggtatgaccggcagccgttacgtcactacctacattgccgaattgaatgcccgtctggctatgatgacaggcgagcaaccaagcggcacggcgcttgccttgcagaagaatgcctttacctatctccatcaggaagctctgaaggaatataaagaaattctcaaagcacagaaagacggtgtgaagtttacaggtgtttccggaagtatcctgcaatatctgtatctgatcgctctgtccggcgaacaagttccggcttccaataaagccgcctatacctattatctgtccaagataggcgaaatgcttccgaccgcttcgatggatacgaaagcgattgccgctatcattctggataaggccggacggaagaaagaagctcaggagttcatcgcttcattgaaagaacatctgacgaagacggacgaacagggaatgttcttcgccttcaatgaaaacccgtatacctggggcggaatgaaaatgcaggctcatgtagacgtaatggaagcgctggaactgacaggcggaaataacgataccgtagaagaaatgaaactctggctgctcaaacagaaacagacccaacagtggaattctccggtagctactgccgatgctgtctatgccttgctgatgaaaggcgtaaacctgcttgacaatcagggagacgtgcgtattgtcattgcaaaggaggtgctggaaactgtctctccaagcaagactaccgtaccgggactgggctatatcaaacgctcgtttacacagaagaatgtagtggacgcccgtaagatagaagtcgaaaagagaaatccgggcattgcatggggagccgtttacgcggaatatgaatcacccatcaaggatgtgagacaacagggaggagaactgaatgtgcaaaagcaactgtatgtggaacgtatggtgaacaatgctcctcaactacagcctattacagaaaagaccgttcttcaggtaggcgataaagtagtttcccgtttgagcattcgtgcagaccgtccgatggacttcgtacagttgaaagaccagcggggcgcctgcttcgaaccgatcggcagcgtatccggttacaactggagtaatggaatcggctattacgtagacatcaaggatgcttccaccaatttcttctttgaccatttaggaaaaggagtgtatgtgttggagcatagctatcgtatcagcagagcgggaacctatgagacaggtttggcaaccatgcaatgcgcctatgcaccggaatacgcttcccactcggcttcgatgacaattattattaaataacgcagggagaagattttttccccaccggtgagcagggcactcgccaccgatgaggaaggtgttccccaccgatgaaggcttccttcatcggtggggaactttttgttgatgaataccgcgttgcaggagttgtcacagggtaaagtattttctcaaacggtgttaatctatgtaatctgtgatgaaaaactcatctaaaactcctacatttgtggaccaaaataaaatatatcacatgaaacgtactttactattgatatttactctgcttactgtcactttggcggctgttgcccaaccccgtatttcctctaacaaggagacgcacaactttggacaaatagaatggaaaaagccggtaacagtagaatataccatcaccaataccggaaacgagccgttggtgctgaccaatgtcacgacttcctgtgcctgtgccgtagccgactggacaaaggaacccattgctccgggtgccaaaggaactgtgaaagcctcttttgacgcgaaagcgctgggacgttttgacaagtcgataggcatatacagcaatgccactccgaatctggtttatctgaaattcaccggtgaggtagtgcaggaaatcaaagattattcaaaacttcttccgtatgccatcggcaatatccgcattgaccgtgacgagttctccttccccgatgtctatcgcggacagcaaccgtctatgacgttcagcattgccaatctttccgaccgcccgtacgaaccggtgttgatgcacctgcctccttatctgaagatggaagcggaacctaaagtactgctgaaaggtaaaaaaggaacgatcaagctgacactggatgccagccagctgcaggacttcgggctgacacagacctctgtctacctgtcccgtttctccggtgataaagtgagtgaagacaatgagatacccgtttcggccattcttcttcccgatttctcgcgtatgacggagaaagattctttgaatgctcctgccatccacatctcggagacgaatattgacctgagtattccgttgatcaagaagaataaagtcagccatgatatattgatcgctaatgcgggcaagactccgttagtcatcagcaagctacaggtattcaactcttctgtaggagtaagactgaaaaagacggtacttccgccggacggaatgaccaaattgaaagtgacgatccacaagcgggatgtaggtaataagaaacatcatttacgtatcttgatgattacaaacgacccgttgcgtccgaaagttgaaataaatatcaaacgctaactcttattgccatggaacatcctgaaaataacgaagaatataaaggactcgttgtcaataaaggcatcgaacagccctcatccgtgaatccttatttgaaacgtaagcccaaaaagcgtcagctttcggtagcggaatttgtagaaggtattgtgaaaggcgatgtcactattctcagtcaggctgtgacactggtagagagcgtgaagcccgaacatcaggctgtcgcccaggaagtgatcgagaagtgcctgccttattccggcaattccatccgtgtaggtatcagtggagtgcccggtgcgggaaagagtacctcgattgacgtattcggtctgcatgtgctcgaaaaaggcggtaagttggcggtgctggctatcgacccgagcagtgagcgcagtaaaggcagtatcctgggagacaagacacgtatggaacaactttccgtacatccccaatcgtttatccgccccagcccctcagctggttcattgggaggagttgcccggaagacccgtgaaacgattgtgctttgtgaggctgccggattcgataaaatctttgtggaaaccgtcggagtgggacagagcgaaacggctgttcattctatggtggatttcttcctgctgattcagttggcaggtacgggagatgaattgcaaggcatcaaacgaggcatcatggagatggcggacggtattgtcatcaacaaagccgacggagataatctggaacctgccaagttggctgccagccagttccgtaatgcgctgcatctgtttccggctcccgaatcgggatggattccgaaggtgctgacttactccggtttttataatatcggcgtgaaggaaatctgggacatggtgtatgaatatatcgacttcgtgaagaagaacggttattttggatatcgccgtaatgaacagagcaagtactggatgtacgagacgatcaatgaacagctccgtgatagcttctatcacaatcctcggattgaagcgatgcttcaggagaaggaacaacaagtgctgcagggaaatcttacttcgtttatcgctgctaagagcctgctggatacctattttgacgaattaaaacgatgataatgcagaaacagtgatggattaaaacgaccgaacatttacccccgataactataccctaattaataaccaattgttaactttacacctaatgaacaaaaccttattaaccgggcttttgtgttgtagtttgtcaatacagagctttgcagaccaaccgttagaaggattcacctatggttcggtgaatgctcctacaggaaaagagtgggaatctcccgaaaacctggcgctcaacaaagagcagccgcatgcttatttctttccgttccagcatttggataatgcccgcaaggtattgccggaaaacagtaagttctggcagtcactcgacggtgactggaagtttcactgggcacccgaccccgactcccgccccaaagatttctatcagactgagtatgatgtcagctcatgggatgcgattcccgtaccttcaagctggaatatttatggcattcaaaaggatggaagccagaagtacggaacgcctatctacgtcaaccaaccggtcatcttccagcacagcgtgaaggtggatgactggcgcggaggtgtgatgcgtactcctcctgccaactggactacttacaaggatcggaacgaagtaggttccttccgccgtgatttcgaaatcccgcagaactgggacggacgcgaagtctttatcagcttcgatggtgtcgattcattcttctatctgtggatcaacggtcagtacgtaggtttctccaagaactcgcgtaatactgctaatttcaatatcactccctatttacagaaaggcaagaataccgtagccgccgaagtgtatcgtagctcggacggttccttcctcgaagcgcaggatatgttccgtctgccgggcatcttccgtacggttgccttgtactcggttcccaaagttcatttccgtgacttggttgccacacccgatttggatgcgacttatacggacggttctctgactgtcaatgccgaaatccgtaatctggataagaaagccatcaaagactacaaggtatattactctttatatgccaataaattgtactctgatgagaataccttagtagacggattcttatctcctgtgatcgacaaaatcgctccgaatgaaaccggtagtgttcagactgttcttaaggtaaaggctcctaataagtggtcggctgaatttccttatcgctacacgttggtagccgaattgaaggataagaagaacagaaccgttgaaatggtttccaccattgtcggtttccgcaaagtggagattaaggatactcctgcttccgaagatgaattcggacttgccggacgttattattatgtgaacggaaagacggtcaaactgaaaggggtgaaccgccacgaatccaatccgggagtagggcacgccattacccgtgagatgatggagaaagagattatgctgatgaagcgtgccaacatcaatcatgtacgtaattcacattatccggatgatccgtattggtatttcctatgtaataaatacggtatttatctcgaagatgaggcgaatatagaatcgcacgaatattattacggtgctgcctccctctctcatccggtggaatggaaaaatgcgcacgtggcacgtgtgatggaaatggtgcgtgccaatgtcaacaatccttctatcgttatctggtcgttgggcaatgaagccggaccaggcaagaactttgtggcggcttatgatgctttgaagaagtttgatgcttcccgccctgtgcaatatgagcgtaataatgacattgtagatatgggttccaaccaatatccgtctatcggctgggtacgtggagccgtgcaggggaaatatgatatcaagtatccgttccatatatccgaatatgcccattcaatggggaatgcctgcggtaatctgatagattactgggaggctatggagtcgaccaatttcttctgtggcggtgccatctgggattgggtagaccagtctatgtacaattatgacccgaagacaggtgtccgttatctggcttacggcggcgactttggcgatactcccaatgatggtcagtttgtaatgaacggcatcgtgtttggtgaccttgaaccgaagcctcagtactatgaagtgaaaaaggtatatcagcacatcggcgtaaaggcgatagatactgaaaagggtgtgtttgagatcttcaataagtactactttaagaatttggcggaagattaccagttggtatattcgctttatgaagacggcaaaccgataatgaccggtaaaccgatggatatcaatgtagctccacgccaacgcacacagatcactctgccgtatgatcatgcttctcttaagagagatgcggagtactttatgaagctgcagtttatactgaaagatcaaagaccttgggctgccaaaggctttccgatggcagaggaacagattttgataaaggaggctacagatcgcccatccatcagtgaagtaactgccaatgcaggaaaactggatggattcgtacttgacaaggatacgaagcgcatccttataaagggaactgattttgaagctatatttgacccgcaaaccggaagtatctacagtctgaagtatggcaacgagacagttatcgccgacggcaacggtccgaagctcgatgctctccgtgcttttacaaacaatgataactggttctatgctccctggttcgaacatggtttgcacaatctgattcataaaacaactgaatataaagtgctgaatagaggcaatggaactttggtattgagctttacggtagaatctcaggcaccgaatgccgcacgcattaagggcggtacaagctccggtaaaaatagcatcgaagaactgaccgacagaaaattcggtagcaatgactttaaatttgtcactaaccaaatatggacagtgtatccggacggttctatcgaattgcagtccagcattacttccaatcgttcaagtttggttctgccacgtttgggttatgtgatgaaagttccccaacaatacagtaacttcacttattacggacgcggaccgatagataactatgccgaccgtaagagcggacagtttatcgaacagtatacgaatagcgtagcaggtgagttcgtaaacttcccgaaacctcaggatatgggcaatcacgaagatgttcgctggtgtgcattgaccaatcaggcagggaatggagctgtcttcgtagctaccgaccgtctttcggcttcggcacttcagtattcggctctcgacttgattttggcttcccatccttatcagttgccgaaggcaggcgatacctatctgcatttggattgtgcagtgaccggtctgggtggtaacagttgtggtcagggaggtcctctcgtacacgaccgtgtgtttgccaaccagcacagtatgggcttcatcattcgtcctgccggtaaggaactgagtgtcgttgccaatgttgctcctgcgggagatcttcctctgtctatcacacgcacccctgccggaatggtcgaattgacttcagcaaagaaagatgctgtcatttgttatagcattgacggaagtaagaaagtgcaggaatacacagagcctgtccctatgcgtaacggaggtacgatcaaggcatggtataaggatagtaaggatatcagcagcacaatgaagtttgagaaaatagaaagcattcagacgcaagtcgtatacgccagtagtcaggaatcgggtgaaggcgatgcttctcatctgactgatggtgatccgaataccatctggcataccatgtattcggtgacagttgccaaatacccgcattgggtagatttggatgccggtgaagtcaaggaaatcaaaggctttacttacctgccgcgacagaatggaggaaacggtaatatcaaggattactctattcaggtcagcatggatggaaaagaatggggagagcctgttaataaaggaacattcgcaagggactccaaagaaaagagagtcttgtttgacaaaccggtgaaggcacgttatatccgtttcacggctttaagcgaacagaacggacaggattttgcgtccggtgcggagataacgattctggctaactaaagatagctgaatatatagaagaaaagtatcaatgggaatgtgtccccccttctaaatttatgagggtttcgacacatccccattgatgcttttctctattttatcggtatgaggaaacttctacaactcctttcccgccttctcaaaatccgccttagacttactctgcgtcacaatatacacacccagaaacacaagtgtaatggcgattcctttttcccagccgaagctcccgattcccatgaggattgctgcaatcgtagccacaatcggctgcatatagttatacatacttaccactgtagggcggagtaacttctgagctgtcatgatgcagagataagcaaggaaacttcctcccagtacgacatacaatacctgcaaaatggcaaccattggaatgctggtccattgaatgaccgaaatatcttgataagagaaaggaatataacacatcgaagcatagataaacatccatttattgatggttactgccgaatatcgctgagacagccccttgaacaccgtcagatagatggagaaactgatttgcgcaaccagacaaagcaagtcgccgatcagacttccgttaccactactcgctgcctgactgctcataataaggataagcgctcccatagctcccacgaaaatacccagtactttcttgttcgtaatcggctctttcagatagatggctgccacaatcatggtaactatcggcagagtagtcgttacgatagaagcatcaataggcgaagtcatcgaaagcccgaagataaatatcccctgattgaaaaccagagcaaagagggaagcaaagaaaatcttcagcatatcgcggtggtccacatgctcctgtttgcagaagatggaaagtatccagaatgccgctgccgcacctaccatacgaaacgtggtgacggagatagctgaaaactcttgaagtgccgatttgccgataggagacatcagtccccacataacgtttgccgtgagtgcaaacagatgtccgtgcagattcttgttattgcccataagtctgtgtataccttttaattgttacctttattgaaaactgctgcaaaggtaaccaatttgtcgcatgatttgtttatatttgccttgattaaaattgaatattatggaacaacaggcagactatatccggcggatcgagatcaaaggactctggggccgctttaatatacaatgggatttgcgtccggatgtgaatatcctttccggcatcaacggagtgggaaagaccactattctgaaccgttcggtgggatacctcgaacagctttccggcgacatacagctctccggtgaaatgaaaagcgacgcaaagaacggagtacacctcttctttgataatcccgcagcgacttatatcccatacgatgtgatccgcagctacgaccgccccttgattatgggtgacttcacggcacgcatggcagacaagaacgtgaagtccgaactggactggcaactgtatctgttgcagcgccgctatctcgattatcaggtcaatataggcaataagatgatcgaaatgctttccagcaatgacgaggaacagcgcagcaaagccgccaccctctcccttgccaaacgtcgttttcaggatatgattgacgaacttttcagctacacccgcaaaaagatagaccgccgtcggaatgacatagccttctatcaggacggagaattgctgtttccatacaaactctcgtccggtgaaaagcaaatgctcgtgattctgctgacagtgctcgtgcaggacaacagccactgtgtccttttcatggacgaaccggaagcctccctgcacatcgaatggcaacagaaactgatttcaatgatccgagaactgaatcccaatgtgcaaatcattctgaccacccattcgcctgccgtcatcatggagggctggctggatgcagtgacagaggtgagcgatatttccaccgaagcggacggattcagactcaccccgactattaattgttaatgacaacttctacatggcaacttcactacgcgataatctgacttcttcttacttcaatgctgcccacaagctgtattccaaaaaggctcgccggcgcatcattgcttacgtagagagctatgatgatgttgctttctggcgcacattactcgaagagtttgaagatgacgagcattattttcaagtgatgctcccttcggccacctcattggcaaaggggaagaagatggtactcatgaacacgctgaataccgccgaactgggcaaaagtctgattgcctgtgtcgacagtgactatgatttcctgttgcagggagccacgaacacttcccgaaagatcaaccggaacaagtacatattccaaacctacacatacgctatcgaaaactatcactgctttgccgaaagtcttcacgaagtatgtgtgcaggccacattgaacgaccgttttatactggatttcaacgcttatctgaaacggtattcagaaatcgtatacccacttttcctgtggaacgtgtggttttatcgtcaacgggatacgtatactttcccgatgtacgacttccatacttatactgccttgagggagatcagtctgaaacatccggaacacagtctggaagcactgcaacaccgagttaatcagaaacttgctgaactgaaaaaacgcttccccggttctgtcaaccaagtgaacggattgcggtcggaattaaaggaactgggactcgtccccgaaaccacctatttatatatgcagggacatcacgtgatggataatgtcgtgatgaaacttctgattcccgtctgtaccgccctgcgccgggaacgggaacaggaaatcaaacgactggcggaacataatgaacaattcaggaatgaattgacttgttatcagaacagccaggtgaatgtcgaaatcatgttgaagaagaacgtcgcctataagcgactcttccactacgactggctgaggcaggacattcaggaatatctggccaaaggagaatgaataaaagggaactaactaataagggaataaactaaaagagatactattttatgaaagaagtgattgatacagtgagtgtggcattggcaaatggagatacggagaatgttggcaatgtcgtgatgcaggaggtcaaccgtacgttgctctcggcaggtgtggatgaagtatgggcggacaaaatagataatctgatcgtattgctgtttattatcggaatagccttgttggctaacataatctgccgtaaaatcattttacgggtggtagccaagttggtgaagcagaccaaagctacctgggacgacattgtattcaaccataaagtgatggtgaatgtcagccggatggtagcgcctatcctgatttatatcgccattcctatcgcattccccgagcatgcggattctgatttgctcgattttctgaggcgtctctgtctgatatatatcattgccgtttttcttcgtttcatcagcgctttgtttacggctgtctatcaagtctacagtgagcgggagcagtatcgggacaaaccgttgaaaggacttttgcagacggcgcaagtgattcttttctttataggagccatcattattataagcattctgatcaatcagagcccgatggtcttgctgaccggattgggagcgtctgccgctattctgatgttggttttcaaagatagtatcatgggatttgtatccggtattcagctttctgccaacaatatgctgaaggtgggcgactggatcaccatgccgaaatatggtgcggacggcacagtgatagaagtaacgctgaataccgtgaaggtgcgtaatttcgataatacgattacgaccattcctccttacctgctgatcagcgattcttttcagaactggcagggaatgcaggagtccggcggacgccgggtgaagcgttccattaatatcgatatgacaagcgtgcgcttttgtactcccgaaatgctggaaaaatatcgcaagatacagttgctggcaaattacgtagatgaaacggagaaagtggtagaagaatataataaggagcatgatattgataattccgtgttggtgaacgggcggaggcagaccaatctgggagtttttcgtgcctatctgaccaattatttgcggagcctgcccactgttaatcaggatatgacctgtatggtacgccagcttcagcctacagaaaccggcattccgctggaactttatttcttttctgccaacaaagtatgggttgcttacgaaggcatacaggcagacgtgttcgaccatgtacttgccatcattccggagttcggcctgcgcgtctttcagaatccgtcgggtgaagacctgcgacggataggagtgaagatagaacactgatttaaaagatagaatactatatattttaagaacgatacatactgttaaccattattgattatgaacacacctatacccaatcagattatccgtgaaattacacctttgtctgacaaagactgtttctatattgcagaacgttataagacggagtttacctatccgattcataaccattctgaatttgaactgaactttacggaaaaggccgccggagtcaggcgtgtagtgggagattcctccgaagtgataggagattatgatctggttctgattacgggcaaagacttggaacacgtatgggaacagaatgaatgccgctccaaagagatacgggagatcaccatccaattctcttccgacctgttcttcaagagctttatcaataagaaccagttcgactctatccgccggatgctggataaagctcagaaaggactttgtttcccgatgtccgccatacttaagatatatccgttgctggatacgcttgcttccgagaaacaagggttctatgcggtgatcaagtttatgacgatcctgtatgaactttctctctttgaggaagaggcccggacactgtccagttcttcttttgctaagattgatgttcattccgatagccgccgggtacagaaggtgcaggaatatatcaatctccattatcaggaagaaatccgattgggacagttggcaagcatggtcgggatgactgatgtgtcattcagccgtttctttaagttgcgtacggggaagaacctttccgattatattattgatatccgactgggattcgcttcgcggttgctggtagattctacgatgtctatcgcagaaatctgttatgagtgcggattcaataacctgtctaattttaatcgtatctttaagaagaaaaaagattgttctccgaaggagtttcgcgagaactaccggaagaaaaagaaactgatctaatttctctgtctcctcgcatactttactagtctgtttctctattagggctgactaataattagcttagaatcgtgttgaatttagagtcttgtttcctaagatttattcttcggggggctgacatctattctccgttaggtacaaaactaatcgtctgacagttgttgtttttttctgacagttgtcagacgaaaaaacaacaactgtcagacgattagtttaactatagtcagacgattaattctgtgcatgacgggagataaattcttttgatatgcggattaaatcttacgtagaagaggactaaacctcattggtaagcggattgaaacagtgtggtaagtcattgataacaagtttgtaacacgatgtaacaaacctgaaacggctatttcaaactattgtatctgattcgtattcatattgtaatctcttgggtctacctttgccgacgtaataaaaacgtagagcgaagttcgatgaaaaaactatttcttttaagattttcagttgcagccttcttttgtttgttgtgtgttcttcccgcattggctgccaatattaagattaaaggtgctgtgaaagataaactttccaaagagcctttgattggagcaacgatacggttggtaggaactcctgccggagccgtgaccgatatggacggtaattttgaattgaacagtaccggtgttttggaaggtttgtatgatatagagattaaatatgtaggatataaaacggaagtacgtcgtaaggtccgtgtagaaaacggaaaactggcgattctgaatctggagttggagacagatgcgcacgaactttcggacgttgtggtggtagcaaagaagaatcgtgaaaatgagaatatgttattgctcgaacagcagaaggcggtcattgccgtgcaggctgtcagcgtcaaagagctttcacgcaaaggtgtttccgatgcggaaggggctgtaaccaaagtggcgggagtctccaaacaggatggagtgaagaatgttttcgtccgtggactgggcgaccgctataatgcgactacctttaacggatttgccgttccttcggaagatccggaatataagaatatctctctcgacttcttcggaacggatattatccagtctgttggcgtcaataaggcatttaatgcaggaggtatcagtgatgtcggcggtgcgacaatcgacattgtttccaaagaactgattggcagcggaaacctgaatatcggcctttccggaggactgaacacgcagactgtgacagccgactttctgaaacaggacggagtaaaccttctgggcttcgccactacaacagaacccgccgatgagaacaactggggattcaagaataagctggacccctccaagcagagcttgcagataaaccggagttatagcatttccggcggaaagcggtttcatataggaaaagacaggaatccgctctctttctttctcactgccggacataccactgattatcaatttacggatgaaaccatccgcaacacaacgacgagcggtacgatctacaaagatatgacaggcaagaagtacaccgagaatatcagccagctggcactggccaatgtggattatgatatgcagaaccgtcaccacatgagttataacttcatgatgattcatgccaatgtgcaatccgtaggagactataccggtaaaaactccatcttcagtgacgattatgataatcagggatttacccgtcgccagcaagcgaatgacaacttactaatcgttaaccagctgatgactaactggggactgaccaaaacattgagtctggatgccggtgcttcttataatatcgtgaaaggcaatgaacccgaccgccgaatcaacaacataaccaaagcggaagaaggatataccttactcagaggcaactcccagcaacggtatttctccactttggacgaagatgacatcaacgtaaaggcaggactcatctaccgtctgaaagataacgtagaagaaatctctaatatacgcttgggctatacaggccgatttgtagacgacaatttcaaggcgactgaatacaacctcacagtaggacacgcttcttccatcccctcattggataatttctcactcgacgattattataatcagcagaatctctcttccggatggtttaccgttcagaagaacatcgataagtattcggtcgccaagaatatccattccgcttatgcggaagccacctaccagtttactccccgttggattgtaaatgtaggaatgaagtatgacaatgtggatattcaggtagactacaatgtgaataaaggcggatcggaaggaagcaacacgattcaaaaggatttctttctcccgagtctgaatctgaaatacaatctgagtgaaaaacattccttgcgtctcggagcgagcaaaacatatacgctgccgcaagcaaaggaaatttctccttatcgctacgtaggtgtgaatttcaacagtcaggggaatgcgaacctgaagccttcggacaactataacgtcgatttgaaatgggactttaatcctacccccactgaactgatctctctgacagctttttataagctcatcaagaatccgatctcacgcattgaagtggcaagtgccggaggatacctttcgtatgaaaatatagccgataaggcaacagtggccggagtggaagtagaagtacgtaagaatctgtttgtccgtccgctaagcagtgcggcaaacggaatgaataagctctctttcggcttgaatggatcgtacatttatacaaatgcgaaaatgcctctggcaacggttaccaccggatcgcaactggaaggggccgctccctggattgccaatttcgacttgtcccacaacttcacgaaaggaactcatagcttcatcaatacattggtattcaactatgtcagcgataagatttataccatcggtacgcaaggctaccaagacatcatggagcagggaatgatgacgcttgacttcgtttcgcaagccaaactcaacaagtatgtctcacttacgctgaaagcccgcaatctgctgaatccctcttatcagttgagtcgcaaagccaacgaaagcggagagaaggtagtactcagcgattataaaaaaggaataaatatcagtctgggagtgtcgtgcacattttaaaccggataatgaaataagattattaactaattattaaagcaaaatgaaaagattgtttgtaaactttatgacgtttgccgctatggcaactgcactgacattcactgcgtgtagtagtgatagtgacggagatgacaatggaaacggtaacggtggaaatggcggaggaacaggtagttctatcgtggtaggcgaaaacatcctgtccggaacactgaccggtgaacagacactggatgccaaagaatacattctgaacggaacggttatcatcgccgacggcggtcgcctgaatatccctgccggaactaccatcaaggcgcgtgaaggtttcagcagttacctgctggtagcgcagggaggtaaactctatgccgatggtacggccgacaaaccaatcgtctttacggcaaataccaccagcccggtatccggatattggggtggcgtgatcatcaatggtaaagcacctatttccggttcaaagaccgacaagagcgatacggcactgacggaaatcaacaatgactataaatacggcggcagcgcagctgatgacaactccggttcgttgacttacgtgaaaatctgctatgcaggtgcacgctccacagcagacatcgaacacaacggactgaccttgaacggtgtcggcaacggaacaaagattgaaaatatctacgtactggaaagtgccgacgatgcaatcgagttctttggtggaacagtaaatgtaaccaatctgctggctgttaatccggatgatgatatgttcgactttacacaaggctattgcggtacgctgaagaactgctatggcgtttgggaaagcgactacacaagtacggaagccgatcctcgcggcatcgaagccgacggtaacatggacggtctgtatccggatcacctgcgtcagtctgactttaaggtggaaaacatgactatcgtgaataatgctgccaacactgccgataacgtagaccgtatgcaggatgtaatcaagattcgtcgcggagcaaaagctaccatcaccaatgcattggttaagggtacgggtggtgctatcgacctggttgatatgaaagacagcaaaggtgcaggaaacatagaatccagcattaacatcacaagtacattaagtctcacaggattgaagcagaacggcgaactgaatacatttgtcgaatcggtagacaatacaggtgcagacgcttctctgttcggctggacaggctataatttatcagcattctgatgaagtagccaacggttctttttcacagtaggtattacttttcgggcacggattgcacgaattgcacggttatgatttactaaaaccgtgtaatccgcgtaatccgtgccaaatcatataataatgagatgcgtttattacgcttttacctccctggctatccctgctactatcctctctcttctattatgaattatttcagatattatatgtttcgctgattttctttttcgtatatttgctattcattattatatgatcaatcacttatgcaaacaaactacgagcgatactgtaaaatgtcttctctggctcagataggatggtgggaagcggactttttggctgggcattatgtctgctctgattttctttgtgatcttctgggactagaaggtgataccatctctttcatggatttccagaatttgatacgtgaggattaccgcgaacagatagtacaggaatttcgggccaatgcaaatatccataaagatttttatgaacaaacttttcccatctgtttaaaaaatggtgaagtttggctgcatacccgtctggctcttcgtgagaaaggtaccggaaccaatggaggtgacaaatcttttggcgtcatccagcgtgttgaggcgcctaaagaagtggaacagaaaaataccctccggcgtgtaaacgacctgttacgccggcaaaactatatatcacagtctttgcttcgcttcctccatgatgacgatgtagattcttgtattatggagatattgaatgacgtgctgagcctctatcaaggcggtcgtgtgtatatctttgagtataacgaagactatacgcatcatagttgcacgtatgaagtcgtttcggaaggtgtttccaaagagaaaaacaagcagcagtccattccggttaatgaaacccgatggtggtgtgagcagattctatctggcaaacccatcatactgacttccttgaaacagttgcccgaagaagcggaggatgaatataaattccttgacgctcaaggcatttgttcgttgatggtcgctcctttgatggcaggtgaccgtgtatggggatttatgggtatagatctggtcgaatcgtatcgtgaatggagcaatgaggattttcaatggttctcttcattggcgaatatcatcagtatttgcatcgaattgcgcaaggccaaagatcgtgttgtccgcgaacagtcttttttaagcaatctgttccattttatgccgttaggttatatacggatgtctgtcgtccgtgatgaaaacggtcagcttcttgattataagataacggatgtcaacaaggcctgttcccgcttctttgcccgacctgccgaaacgtatataggagtcttggcctctgaaatatatccggatttttcttcacagctcctctttctgaaagaagtgctggataacaattcatacagggaaaaggatatctttttcccgcagacagagctttatacccattggatagtttattctccggaaaaagatgaagtggtaggtctgtttacagattccacggaggccgtgaagaccaatagggcactggaccgtagtgagaagctttttaagagtatctttgccaatatcccggcaggagtggaaatctatgataaggatggattcctgattgacctgaataataaggatctggaaatattcggtgtagaaaataaacaggatgtgataggagtcaacttctttgagaatccgaacgtaccgcagcatatccgtgaccgtgtgcgggatgaagatttggtagacttccgtctgaattactcttttgaacgggcagaaggttattatcaccccgatcgtcgggatacgatagatatatatacgaaagtcagcaagctctatgataacgaaggaaactttaacggctatatcctgattagcattgataatacggagcagattgatgcgatgaaccgtattcgtgattttgagaatttcttcctgctcatatcggattatgcaaaggtgggatatgccaagttgaatctgctgaaccggaagggatatgccattaaacaatggtataaaaatttaggtgaagaagaggatactccattggcggacgtggtgggagtctatcgtaatatgcatcccgaagaccgtgaacgtatttttgatttctatcgggaggtcagaaaaggaaaccggaagcactttcagggagaaatgcgaatctgccgtcccggcaagaagaatgaatggaactggatacgtatgaatgtagtcgttacgacatacaatccggaagaaaacgaagtggaaatcatcggtatcaactatgatattaccgaactgaaggagacggagaaagaattgatcctggcacgtgacaaagctgaaatgatggaccgtctcaaaagtgctttccttgctaacatgagccacgaaatacgtactcctctgaatgccatcgttggcttttccgacttgctcgtcgatacggaaaatatagaggaacggcgggagtatattcagattgtgaaggagaacaatgacctgcttttacaactgatttcggatatactcgacctgtctaagattgaagcgggtacatttgagtttaccaacggagatgtagacgtgaatatgctctgtgaagatattgtccgctccatgcaaatgaaggtgaaggagaatgtcgaactgatgttcgatccgcatcttgcggaatgccgcattattagtgaccgtaaccgactgcaccaggtaatctccaattttgtgaacaatgcgattaagtttacctcggagggaagtatccgtgtgggatataagcagaaaggagaagaactggagttctatgtacaagacacgggagttggtattgacgcagagagtcaggcacatatttttgaacgttttgtgaagttgaactcctttgtacacggcacgggcctggggctctccatctgccaaagtattgtggaacaaatgggcggaaagataggggtggaatccgaaccgggaaagggttcgcgtttttggtttagccttccctgttttgtggtgatgtcggaagaatagacaagaatgatggggctgactaaaaagtcagccccaaagagtcggtttcttatattccgaatgatagtttatcgatagactgatatacgatacttgcaatacccagtccgatgatgcccagtgtgcagagcgccagtccccactttgtacagcggtcgctgcggaaagtcggaatcgggttatcggaaggcgtgatatacattgcttttacaatcagcagatagtagtacaatgaaatcacggtattaaccagtgcaatgaataccagcaagtggaagcccgcttcgaaagctgccatgaaaataaagaacttcgagaagaatccggcaaacggaggaatacctgccagtgagaacagcgaaatagtcatcagaaaagccattttcgggttcgtcttgtagagtcctgcataatcttcgagggtaaacttctgactgcgtaatgctacgatagtaatgacggcaaatactccgagattggcagcggcatatacaagtatgtaatataccatggcggtcattccctgtgccgttcctccgattacacccagcatgatatatcctgcctgcgaaatactggagaacgccatcagacgcttcagattctgctggcggatagcgaatatattggcgatggtgatagaagcgatagtcacccagtaaagtacttcttgccagtcatgtatcatcggtgcgaatactttgatcagaattgccatcagcacaaatgctgccgaacctttggagataacactcagataggcggtaaccgtactcggtgcaccttcgtaaacgtctgccgtccataaatggaacggaaccagagagagcttgaacgccataccggtaaagaagaatacaaaagccatgatttgcaacggatttccatcgatatgagcaggaagatcatcgaaatacagtgttcctgcggaaccgtaaatcattgacagaccaaacagtaacagtgcgctggagaaaagtgcggtaaggatatacttggcaccggcttcagcggagttatggcggtatttgtcgaaagcgatcaaggctgccatcgggatggaagctgtctccagtccgatgaagaacatcaggaagtgtccggcggaaatcatgagatacataccgaacagggtggagagtgtaagtacatagaactcaccttgcttgaatgaagtatcgtcgcgtttcatccattcgtgtgccatcaggaaaacaatcagcgtgcctatgttcaggattgatttgacaaccgtgtgcatgggtacatagtgatacataccgccaaaaatgtcggcagctgtgcttggaaccagattgatcgctgtatggatggccatcaggataactggcagcatggtgttcaaaacgggtctcgtccctttttgcttgtgtgcgtccggactcatgaagagatcggcaaggaacagcaatagtaaaactgctacgagcgacagctcttcccgcatatgtagaaattgtgaataatccatctttataaattaagaattaaagattaaaaaataaaggttatgggatgagttgtgagactacagggagtacactttcaccaatcatgtggcttacccagaaaggagccatacccagtccggctacataaacgatgaggcagataacagctacccgttcatcccaggttgcgtctgtcagcgcaagatgatgtttgttggtgcaggtaccgtacagaatcttgcctaccagacgcaggatatagactgccgtgatcacgatggatgaacaagcgatgatggtcagtgtacggtggaatacgtcgttgttctggaaagaacctacgaagatagtcatttcggcaatgaacccgcttaatcccggcaaaccgagattggcaagaccggcaatcacataacatacgctgaggaacggcattactttcattaatccggtaagctcgcggacatcacgtgtgtgtgtacgtccataaatcataccgatcagggcaaagaacaaggctgtcatcaatccgtgggaaagcatctgaagaatggctcctgtcgcagcagtctgattcagcatcagaatggcgaaaagtaccagtccgcagtgagagacggaagagtaagcgttgatgtatttcaagtctgtctgtacgcaagcggagaatgctccgtaaacaacggagatacctgtcagtatcaggaatatccatgaaagctcgttagcggcttccggcatcagatacatggcgatacggaaacatccgtaacctcccagtttcatcagtactccggcgtgaagcatggatacggctgtcggggcggaagcgtgaccatcgggactccatgtgtggaacgggaaaagagcacccagcacaccgaacccgaggaaggtaagcgggaaccagatacattgctgtgcaaaaggaatattatgtagctgtgctatttccagcaggttcatggtggtagctcccgaaccgaaatagattccgagaataccgatcagcaggaaagcggaaccgcccatcagcataagggtcagcttcatggctgcatattctttacgtcccgaaccccatacaccgatcagcaggtacataggaatcagcgcgatttcgtagaacatgaacatggtgaataagtcgatggatataaagaatccgaagactcccatagacaacagtgtgaaccaaaggaaatattcttttgtcagaggctgcagacgccaggaggcgaaagtacctgtgaatacaataacggcagacaataacaacatggctaccgaaataccgtcaacgcctaccgaataggagatgtgaagcggtgcataccagagtgtatccgcacggaatagcatttctgccgtgttgccggcactgcgttctcccaaatacataaaggtaagtacgacggaggcaatcagaagtgccgatgcgccggtaaccataaccccccgaatcgctttgattccccgtgctgcccaaagtccggcaagcatcagtaaggggatgagtacgaagattgataaaaaattcataattgaattattaagttttaagtattaattcgcagcgacttgttgcgcagcttaatatctaatacctgatagttaatacttgctatagaactaacagcaggataagcgccagcgctccgcaaaggaacacgtatgcgtattgctgtacctgaccgctttgaagaccacgtatctcgtcgcttgtcgtattcgtagcccatgccaggaaattaaagaatccatccactacatgacggtcgaaccatgcgataggagtcgaaatgcaacggaagatgatcttatgcgtaataaactggtatatatcatcaatataaaaacgatgataagcagctgtccacaatccattgaaccgtttggcaagtgcattggcaacaggctgtttggcattcttatacatccatgtggcaatcccgatagaaataatcgcaattacaacgcttgtgacagctaccgacagatcgaggtgaatagagtaagactctccattcgaactgataaaatgtccgaaaggaatgaaccctgcaccacaagtaacaaccgccagaaacatcaacggaaaagtcatagccaacggactctcatgcggggtgtgatgagcatgaagctctttatttcctttgccccagaagatgccgtagtagaggcggaacatatagaaggcggtcattgcggcgattactgtcatcacccaacccattgcagggctatattggaagcaggcagccaaaatctcatcttttgagaagaaaccggagaacggaggaataccggcaatggcgagacaggcaatcaggaatgtccagtgagtaataggcatgtatttgcgtagtcctcccatggctgacatttcgttggaatgtactgcatggataatgctgccggcacccaagaagagtaatgccttaaacatggcgtgtgtgaagaggtggaacatggaagccatatatcccagtcctccgtggtgcgggtccatagaagtacaaacgcccagtgctaccatcataaaaccaatctgtgaaatggtcgagaaggccagcacacgtttgatatccgattgtacgcaagccacgcttgctgcataaaaggcggtgaaagcacctacccaggcaatcatatgtaaggtgtccggtgcataagcaatgaaaagcgggaacatacgcgctaccagataaacgccggcaactaccatcgtagccgcatggatcaaggcactgacaggagtaggaccttccatggcatcgggcagccagatatgcaacgggaacatggcactctttccggcgccaccgataaacatcagtcccaaagccaatggaagcatggaagcgccgccactgatcaatgataccgtatccggtgtgaagccgaatgtgccaccgtagtatccgtaaatcagaataccgataaggaagcctaagtctgcaaagcgggtgacaatgaacgctttcttggaagcggcaatggcagcaggctttgtatagtaaaaaccgatcagcagataagaactgacacccaccagttcccagaaaagatacatctggaaaatgtttgtggcaacaaccagtcccagcatagacatcgtaaacagggacaggaaagcgtaataacgttgaaagcccgtctcacctttcatgtagccgaaggagtagatatgcaccatcagtgacacggtagaaatgacaatcagcatcatcacggatataggatctagcagaatgcccagatcaaatcgtaaagtctcggtgaaaggaagccacgtaaaattataaggtatcaatgtggcaaatgttccgtcttccaaacgaggggcggagaaatattggaaagccgtaacgtacgatagtactactactgctcccagtatcagcgtaccgatagcacccgctgtccgatgagacatccattttcctccgattcccagaatgaggaaggagaggaagggaagaaggagtattagaattgttagttccatacagtttattttaattacttgttttattattgttcatatttatcacgatatccatccgaatggaaattgggtcgtgccgctttggcactaccacttcagatcgtccagattgcggacttgaatgcttcggaggttgcggtaaatgttaatcatgatggcgatagctatagccgtttccgcagccgaaatagcgatggaaaagagtgcaaagaaatagccttccatgcctcccggaaagagaaaacggttgaacacggcgaagttgatgtccgtggcgttcagcattaactctacagaaatcaggatagccagcgtattacggcgggtaaagaacccatagattcctgcaaacatcatgatggtagaaactaccagataatattccatgtgtatcatatctgaaattattaggttttaagtaataagtattaattccttgcggttcattgcgcagcctaatacctgatacttaatagttaatacttacttatttatctctttcgggcgatcatgataccaccgatgatacaagccagcaataaaatactgattgcttcgaaaggcaatatataaccatatttgtcactgcttaataaagcattaccaatggtgtggatgtttatttccagcggaaccaggttggtcgtttgcaggaagttatgcttcagggtgataaacaagataatcgctaaaccggcaaccatcgtaaagagtcctgccagaaacctgcttcgtttcagtttctcggcgcggtcaccttctccactggtcagcaggatggagaatacataaaggacgacgataccaccggcataaaccataatctggacagaccccagaaatgtgtaacccagcaggaaatagatgccagccgtgccgaagagcacgaagagcagataggtggctgagcggacaatacgttgggtagtcaccgtcatgatggacattgcaataataaatgctgccaaaaagtagaatactactgtttcaagtgttgatcccatatctaaacttcttttttcttttcaattactttactaccggcatgattcagttgcagaacaagcttcgtccggtcaaagacggcatgttcgaagttctggtcgaacgtgatggcgtcatgcggacaagcgttgacacacagttggcagaacatacaagctccgaggtcatattcatattttgccaggattttcttcttcttgccgtcttcagtctcgatcgtttcgctggttacggtgattgtatcgttcggacaagctatctgacacaatccgcaggctacacagcggtgttcgttattctcattgtggggcattgccagtgtaccacggaaccggtcgaacattttcagctctttccggttttcaggatactgttcggttaccttcttacggaagtataccttgatactggttttcatacccgttgccagagtgctgataccatgtatcagtcctcccaagtacgtatatttttgatctttatattccataattcttattttagaagtggaagccaaaggcaacacaacatgccattaataataggtttaccatagaaattggaaccagatatttccattccagattcagaatctggtcgatacgcaggcgtgggaaagtccatttgatccacattaagaggaacacaacgaagaatgctttggcaaagaaccagatgaagccgggaatatagtccataacagcgttgaatccgtccaaaccgacgatatgcaatggcatccagcctcccaaaaagatggtagcggccacgctggctacgataaacagattcagatattccgccagataaaagaaaccgaagtgcataccggaatattccgtatgatatccggccgtcaattcactttccgcttcgggaaggtcgaacgggccacggttacattctgcatttccggcaatgagatagatgatgaaagcgataacggcaggaatatgtcctttgaagataaaccatccgtcagcctgtccttctacgatttcggagaactgcatggtgcccatcagtacgaccatcgtcatgatgctcatacccactgacaactcataactgatgatctgtgcgccgcttcgcatggcaccgatcagcgaaaacttgttgttactaccccaaccggcaagcagaatacctaccacaccgatgctggaagcagccagcaggaagaatacgcccacattaaaattcagaatttccgctcctttattaaaaggaatacaagcgaaagtgaggaacgaggcgataatcaccatgaatggagccagattgtagaggaagcggtcggcattcttcggagtgaaaatctccttggtcagcatcttgagtacgtcgcatatcacttgaatagaaccccatttaccgacacggttcggaccgaggcggcactggaagaaaccacagactttgcgttccatgtaaatcagtacgatagccagaattgcatatagtgcaacgatgcacacgccgacagctatgcactctataaagatggcccatccctccggcataacggagagcagcagctcatgtatccagtttgttactatactaaagtcgaacatatatattttaattattaggttttaagtattaagtattaattccatgcggaatatagcgtatatcatattgcatagtcggttaatacttactactttatacttaatacttgttttttatcttttgtttatcggtcgatgtccggaactacatagtccagtgttcctccgatggcaatcaagtcggcaattttcgctccgcggcaaatcgtgtcgattgcagcaacaagtggcaatcccgtagcacgatagtgcaggcgataaggcatcttgtcaccctgactttcgagaaagactccgaattctccgcggcttccttctacggcggcataataactgccttcgggaacgcggatgatcggtttcatcttttcctgatacgggccttcgggaatgttgtctatcaactgctctataatcttcagactctccatgatttcgtccatacgcaccagataacgggcgaaacagtctccttccgtataaacaatttcctggaagtccaccttgtcatatacaccgtacggtatccgcttacgtacatcgcaagcccaacccgaagcacggcctgtacccccggtgcaaccgaatgagattgcatcttcacggcttaacactccgacgcccttcatacggctctgagcgataatgttgccggtaaatatgtcgtggtattcgtgaatgatacctctcatataagggataaattcttttacccgcttgacgaagttaggatgaaggtcggcctgtacaccgccgatggtattgtagttcatgatcagacgtccgccgcaagtctcttcaaaaatatcgagaattttttcacggtcacggaatccgtagaagaaagcagtcagtgctccaaggtccatggcgagggcggagtagaacagtaagtgagagtcgatacgttgcagctcatccataattgtacgaatgtatttgacacggtcactcacttcgatgcccatcgctttctcgatgcacatacacaaagcgtgacggttctgatgtgcgcccagatagtcgaggcggtcagtcaatgccaatgtctgcggatatgtaagactctcgttcattttctcgataccccgatggatataaccgcagttagcatcgatcttacgaataatttcaccttcaagagaaacgcggaagcgcattacaccgtgagttgcagggtgttgcggaccaatgttgactacatactcttcttctccaaagagtttcatttctctgtttttaatcgttccgtccggattaagttctatttcctgtgttgtatcgaacgtctcttcgttagtcatacaaagcggattatctttctccggatcattatctttacgcatggggtatcctacccagtcattacgtaagtaaaggcggcgcatatcgggatgccctacgaaaacaatgccatagtagtcgaacacttcacgttcgtagaagtcggctattttccatatatcgctgactgacggaatttccggtcgttcacggtcggtaacggctgttttcagtgctatccgttctcccgtaacagtcgattccagatggtagacaacgcctaaaccacggagtttctccggtgcgtctttttcgtctgctactccccagtccataccagtgaggctttcaaggaagtccatctgtttttcatttcgcaagcgcagcatttcgtcgtgtaacgctgcagggactataaattgtatttcttgcataattcttcgttcctcattcttcatttcataaattccggtttcttctcttttctgttcgttccaccaaagaatttctctattttcactttgcgttgtagttgcatcatgccgtaatagaaagcttccgggcggggcggacatccggggatatatacatcgaccggaagaatcttatctactccattcagcacatgataagacttcttgaaaggccctccgctgacagcacatccgcctacggcaactacatatttcggatcgggcatctgatcgtacaaacgtttcagtaccggtgccatcttgttggtgattgttccgcagaccatgatcatatcagcttggcgcggactggcacgtgctacttcgaacccgaagcgggccatatcataacgcgcggcacccagtgccatgaattcgatgccgcaacagctggttgcgaaagtaagcggccacagtgaattgctgcgtccccagttgacaaggtcgtccagaaccccaagaaaaacgttcgctcctccggcattaagttccttgaccaacttttccaatgactcattgtcgatgaactcatcatacggaattgattttattttcggttttttggttatttccattccaaagctcctttcctccaggcataagcaaggcccagaaccaaaataataaagaagaagagaatactaacgagcccctgaggtcccatgtcatgcataactactgcccaagggaacagaaaagctgtttccacgtcgaacatcaggaacaggatggcaaacaggtagtaacctacacggaactgcatccatgatttaccacgcgttggtataccacattcataagcttcaaacttttgtacattgtacgaacgtggtgaaatagctcgtgaaagggctattactacaccgacaaaagcgagcgctgtcagtaaaacaacaactaaaaatgtaaaattcataatttcaatagctgtttagattgaatattatatagaaataaacaattagtttctccacacccggatgaaaccaactgtaatgaattgacgaataagataatggattgtaccgtctaaatgacgatcttccttaaaccatatatataatatgtaataggatcgtaaaagtacttgggaatatggagtgaatgagtctgagacgtgttttgctggcttttgtattcacggaaataagtaatcagcaattgcacgcttttatctgtagggatgtgtgcaacatccgcatgactcatatcacaagactgggtagaatagaaataatgaagacgttcaagagcattatgaacaggatgatcctgagatacgtagcacttctcctggcgatatgtcgggggggatactctgcagttatcttccattgcttcattggaaacaacatggatcagcaaagcaagtaccagaaatagtccgtattttaagctttgtttcatctttctcttttaacggctgcaaatataggattaatattcatgttttttgcaaagtcggggttacaaaaaagtattttttaacttgctttatttcaagtccgtttttatttcagtgctactctggagaatcttcttcttttatggtatatatccgttcttatttggttaaaagatgtaataaaaagaacgatttacgttctttttgacgaattacccaaagaaaattcatttttttgcaaattgtatataacacattgatatgaaacacacactttgctttataacaatcctattgggttctttgttggatctttatgcaaataacgagaatgattctctattgaaagttttagataaagtgatttctgagcgtcttgtgtatacagaaaagaaggaagctactatcaaagagctgaaagcaaaaaagaaggaacaaaagaccttggacgatatgtatcgtctgaattccgagattctccatcaatacgaaacgtttgtctgcgattctgcggaacagtacattaatgagaatattgagatcgctaagaaactggataataaaacctatttgctggaaggaaggctgcaactggcttttgtttattccttatcggggttgtttattcaagctaatgatattttcaaatcaatcaattgttcggatttacctagtcatttacaggctttgtattgttggaatcgcattcggtattatgaaaacttgattaaatatacagatgatgctcgatttgccagtgaatatttgattgaaaaagaggcgtatcgagatacagttatgagtatcttgtatgatgcatcggaagaatattcgaaagaaagagctataaagcttcaggatcagggcaatacaaaagaagcacttaagatactgactaaaatttatcaaaaggaaaaacctggaactcacgggtttgcgatgatgtctatgggattatcaagagcatatcggctggtcggagagcatgaattggaagaaaagtatcttatattagctgctatgaccgatataaaactggcagtgaaagaaaatgaggctttgttgactctagccgtgaatttatatcataaaggagatatcgatagatcttataattatattaaagtagcactgagtgatgctatcttctataattcccgttttaagaatacggtaatagctcgtattcatcctattatagaaaatacttatttatataggctggaaaagcaaaagcagaatcttcgtttttatattttgctcactagtttgtttgttgtggctcttgctatcactttgtattttacttataaacagactaagattgtttcccgtgcaaagaagaatcttaatgttatgaatgaagagttagttgcattgaacaagaatttggatgaggctaatttaataaaagaaagatatgtaggctatttcatgaaccagtgtgctgtttacattaataagctggatgaatataggaaaaatgtaaatcgaaaaataaaaaccggtcaagttgatgatttatacaaatcttcttctcgtcctttcgaaaaagaattggaaggattatataccaattttgataaagcgtttttaaaattgtatcctaattttgtcgaagagtttaattcattgttgaaaccggaagattattataaattggacaaagaccagttgaatacagaattgcgtatttttgctttgatgcgaatggggattacagatgtttcgcaaattgctgtttttttgcattactcagtacaaacgatctataattataagagtaaagtgaagagaatgtctttattggatggaaatatcttcgaagaagaggtgaaaaagcttggttctttgtctcaaaaatgattctatttggtttaccaaaaccttaaaatggttgtttgttaatgtattgaataataatgttttatctgaaaaaggtgttcaaaaacgtctactttatagcctacttccaataaggagtaggcttttttcatctctatatttgcatcacaagatttttgataactgaatactaatctaaagaaacacagctatggatttttcagaattgtatcttacttattattcaaaactggttcggtttgcaaaagaatttgtaatactggaagaggatgcagaaaacataacacaagatgtgtttaccgacttatgggcgaaacgtgattctatggatcgcattgaaaatatgaacgcgtatcttttcagattaataaagaatagatgcttggatcatttgaaacataaaatgtttgaacagaagtatattgaatcagttcaaacctctttcgaaatagaaatgtccttgaaattacaatctttaaacaggtttgatgtgtctgatatctcggaaggaaatgaaacggaaatgctcgttcgtaacgcaattaatagtctgcctcgaaaatgtcgtgacatatttttattaagtcgtgtcgaagggttaaaatatagagaaatctcagaacgtttgggtatttcagtaaatactgtagaatgtcagatggggatagcactcaaaaagttaagggtaaaactaaatatttgccttgcagcatgagttttaataattttattgatatttttttaggggtatgtactgggataatcgttcttttgtaaaaaggaacgaataatgggaactaatttaaataaatattttgcaggtgaattgacttcagaagaaaaggaagtcttccttctgaatgtgaagaataatggggaaatgcgcgaagaatttattgagtatcagagtgttgttgctctcctggattggtcgttccctaaagatgataaagaacttgctaagcaaaaactatctgaatttatgagtcggatagagaatagcgaaaataaaaaggcttaaaaataccatgaatagactttatagcatcatattactagtcgtctttatatgtacgcatgctcattcgcaacaagcttattttgttgatggatatcatggagggatatacgggcattatccggtgaagtggaaaactcagtttattgtcgaccagttatccaagcatccggattggcgaatttgtctggaaatagagcctgaaacatgggatacggtacaaatacagactcccggagcctatcgacaattaaaaaacgtagtagtaagtaagcaggtagagtttacaaatcctacttatgctcagccttattgttataatatatcgggcgaaagcattatacgtcagtttcaatatggtattgctaagataaataaacattttccgggagtgacttttaccacttattctgtggaagaaccctgtttcacaagttgtttgcctcagatattgaagttatttggttttaagtatgccgtactcaaatgcccgaatacttgttggggaggatacactaacgcttatggcggcgaattggtcaattgggtaggcccggatggaactcccattcttactgttcctcgctatgcttgcgagaaattggaaaagaattctacttggcagacaactgcttggtgtaatgaagaatcttatctgaatgcttgtcgtgatgcagggattgaacatcctgtgggaatgtgtttccaagatgccggatggaaaaatggtccatggttaggaagtggaaagaataccaaaagtaattcagtttatgtgacgtggaaagattattttgagaatatttccattggtaaaacgaatgatgactggcatttttcgcaggaagatatgcgtgtaaacttaatgtggggaagccaagtgttgcagagaattgctcaagaagtacgtacttctgagaataaaataataatagcagagaagatgtctgttattgctcatcttgccaatgggtacacttgtgttcaggaagatttggatgaagcatggcgtactttgatgcttgcgcaacatcatgattcttggatcgtaccttacaatggcctaaataaatttggaacctgggcggatcaaataaagcgatggacagatgagacaaatactgtggctgataaaattacagctgcttctatattcagttttgataacgatactattaatactgaaaaagcccagggatttgtacgtgtttataatacattgggaacaaaaagaaaagaactggtaactgttgaactccctcaggaatatgcagactttgatttggaagtcaatgattatagaaataaaaaagttgattattcaataggaaaagaaggtggaaaaataagattgttgtttgaagcagatgttcctccctttggctactccacatatcgtattaaacaagtaaagacaggtaaaagaacggtttcaggaagcgaaaagattataaatgaaggagaatatgtggttgaaaatgatatgtataaaattgtttttgacttgtcgaagggaggaattattaaaagccttgtagcaaaaaaagaaggaaacaaagaatttgccaaacaatcgggtgaatattctataggtgagttgagaggctatttttatgacgaaggcaagtttcgctcttctacagaagctccggctaagctgacggttttgcgaagtaatatacaagagacaaaggtaaaactggaagggaaaattgcttcacatccttttgtacagattataagcattgctcaaggggagaagcgtattgattttgaccttactattaattggaagaaaaatgtaggtattggagaatataaagaaaatagttggcgggataatcgcagagcttattgtgatgacagatttaagttaagtgtacttttccctgtaaatcttcattctcctcgtatttataaaaatgcgccgtttgatgtttgtgaaagtaagttagatgatacttttttcaatagttgggatcagattaagcataacattattcttcattgggttgatttggcagaacaggaaggagattatgcattggctttattcgcagaccatactacttcctattcacacggaaaagattatccgttaggactgactgcccaatattctggtaatgggctttggggacctgactataagattactggaccgttgaaaatgaaatatgctattgttcctcatcgtggcaaatgggacaaggctgctatagccacgaagagcgattgttggaatgaaccattgttatgttcctatcattcatttgcaaaattggagtcaaggtcactggtagacttaaaaaataccggttatcaggtgagtgcagccaatataaaagatgggaaaataatcttgcgattgtttaatgcggaaggtgacaggaagcagcataatattacttttgatatgccgctgtctagtatagaagaagtagatctgaatggtagaattatagatagaaagacaataaaaacacgtaccggaaaatctgaaattagtatttctatgcctcgtttcggtctaaagacatttgctttgaatttgaattgaacatattctaataatagtaaactgtaatatttttatgtataaagctagcgctaatattttaatagcttgctcttttttgtggctgactgcttgttcttcagcaggagtagtaacagaagaattaattccgactgattatgtaaatccttttataggagctagtaccagtgtaggagctgccggtgtttatcatggattaggtaagacatttcctggcgctactactccgtacggtatggtacaagtaagtcccaatactataaccggaggtgataatagttccggttatagtgatgaacacaaaaccattgaaggctttgcctttactcagatgagtggagtgggctggtttggggatttaggaaatttcctggtgatgcctacaacgggcgaactgcaaaaaatagcgggtaaagaagatggtagtataaaagggtatcgttcttcttatgataaagctaccgaaacagctaaagcgggatattattcggtagaactgactgattataagattaaagtagagagcagtgcgacacctcattgtggaatattgcaatttacttttccttcgaatgaacaatctcgtattcagatagacctggcacgtagagtgggagggacttctacttcgcaatatgtgaaagtattggatgattataccattcaaggctggatgaagtgtacacctgatggtggtggatggggaaatggtgagggaaattccgattacacagtttattattatgcacaatttagtaaaccattgagtaattatggcttttggagtgcggatattcccgatgaatgggttcggaagcgtgatgaagtggtaagtattccctatctgacacgtatatcacaagctccggtcattaaagataagaaagaactggaaggaaagcaccttggcttcttcacagaatttcccacaaaagagggagaacaggttgagatgaaagtaggcatttcctttgtcgatatggaaggagcagctaataactttaaacaggagattgcttctaaaaactttgctcaagtaaaacaggaagcgagtgatttgtggaataaagaacttagccgtatacggatatccggtggaactgatgacgaaaaaactgttttttatacatcattatatcatacgatgattgaccctcgaatctatacagatgttgatgggcgatatattggcggagataaaaaggtacatgaacaggacggtacatttaccaagcgtactatatttagtggttgggatgttttccgtagccagttccctttacaggcgatgattaatccgcgtttggtgagtgatgcgttgaattcgctgataacgatggcagatcagagcagacgggaatattatgaacgttgggaacttctgaattcttattctggctgtatgataggtaatcctgcactgtcggtgctggcagatgcttatatgaaaggaattcgcacgtatgatgtagaaaaagcatatcaatatgcagtcaacacgtcagctaagtttgggaatgattcgttgggatatactcctgaaccgttgagtatttcatatactctggaatatgcctatgcagactggtgcgtggctcaattggcaaaggcgttggggaaagaagaagatgcaaagcgcttttatgaaaaagggcaagcctatcgtaatatgttcgatgcggaaaaaggctggttccgtccccggaatgcagatggatcatggaaagcatggccggagaatgcactgaccgaagaatggtatggttgcattgagtcaaatgcttatcagcaaggctggtttgtgccgcacgatgttccgggaatggttgaactgatgggaggcaaggaagaggttatagctaatttgactaatttatttgaccacactccctctgatatgttatggaatgattattataatcatgctaatgaaccggtacattttgttcctttcctttttaatcagttggatgtaccttggtatacgcagaagtggacacgatatatttgtaaaaatgcttatgcgaacaaagtagaagggattgttggcaatgaagatgtaggacagatgtcggcctggtatatattggctgcttccggaattcatccttcctgtcccggtaacacccgcatggaaataaccagtcctgtttttgacaaggtagaatttaatctggactcaaaatatcatcaagggaaagtatttacaattattgctcacaacaacaacacaaataatctatatatacaaaaagctttgctgaatggcaaggagtacaataaatgttaccttgactttgctgaaatcgcagcaggaggaacattggaattatttatgggcgataagcccaatacagaatggggtgttttatctaacatttaaataactgaatattatgatgaataagtttagacttcttttactagcatcaagtttgtttgtactgaatggaatagggcatgctcagacttctaccatgtcactgaacagttccaatcctaagatagtatgggaagtcaaaccgcaggcagatttgaataatatagggggagaacaaatctctaccccgggttttaaaatgccggactatgtaaggggcgtagttcccggagctgtttttacagcatatgttgaagccggaatcgttcccgatcctaattacgctgataatatatataaagtagatgagacgttttataaccgtcctttctggtatcgtacggagtttgaacttccggcatcttattcagcaggtaagcgtgtttggcttcattttgataataccaaccgtttcgcagatttctattttaatggagaaaaaatatcgggaacgaagacatccactaaagatgtgagcggacatatgttgcgttctaaatttgatgtgacacatctgattaagagatcaggaaagaatgcggttgcggttctgattactgatcctgatcagaaaaagactcgtaaaggaaaagatccgtatggtgttgcttgtagtcccagctatctggcaggtgccggttgggattggatgccgtatgtgccgggacgtcttgccggaattacaggaaatgcttatctggctattacaggtgatgctgtgatggaagatccgtggattcgctcggaattgccgactttgcaataagcagaactatctttctctacaggaatcaagaacgtttcttctgctccgaaagaagtggaagtttccggtgttattcagccgggaaatattactttctccaagaacattcgggtggaaggaaaagaaacagtacagttgtcggtggataagagcgattttgctgcattagtcattcgtaacccgaaactttggtggcctaacggctatggagaaccgaatctttatacctgtaaactgacttgttcggtagatggaaaaatatcggatgaaaaggatattacttttggtatcaagaagtatgagtataagatgatcaacaacgtagtgaattacccggtccttacattctttatcaatgggcagaagatttatctgaaaggtggaaactggggtatgagcgagtatttgcttcgttgtcatggcaaagagtacgaaacgaaaatcaagttgcataaagatatgaactacaacatgatccgtttgtggacaggttgtgtgactgatgatgaattctatgattattgcgataagtatggaatcatggtgtggaatgatttttggctgtatgtcgcttataatgatgtagctgagccggaagcattcaaagcaaatgctcttgataaagtgagacgtttaaggaatcatccttctatagctatctggtgtggtgctaatgaaacacatccggcacccgatttggataattatttgcgtgaaatgatagctcaggaagataaaaacgatcgaatgtataagtcttgttccaatcaagatggtttatccggaagcggatggtggggaaatcagccccctaagcaccattttgagacttcgggcagtaatctggcattcaataaacctgcttatccgtatggtatagatcatggttatggtatgcgtactgaaataggaacggctactttcccgacatttgaaagtgtgaaattgtttattcctcaggagtcatggtggcctctgcctactgatgaacaattgaaagatgatgatgataacgtttggaataagcacttcttcggcaaagaagcgtccaatgccaatcctatcaattataagaaatcagtgaatacgcaattcggagaatcttcgagtctggaagagttctgtgagaaagctcagttgctgaatattgaagtaatgaaagggatgtatgaagcatggaatgataagatgtggaatgatgcggcagggcttttgatctggatgagtcacccggcatatccatcattcgtgtggcagacgtacgattattattatgatcctaccggagcttattggggagcaaagaaggcttgcgaacatcttcatcttcagtggaactcatctaataacagtataaaagctgtaaatactactaccaaagacttgaaaggcgcttatgccaaaacgaccatctacaacctgaacggaaaagaggttgcggcatatggacgtacaaaacagatggatgtaccggcaagtaacattgcagaagcgttcacgttaaacttcaatccgtacaatttggcttttggcaagaatgtgatagcttcttcatcatcaccatccagatcggcttctttagtagctgacggaggggcaggcagtcgttgggaaagtgatgcgagtgactctcaatggatttatgttgacttgggtaagaaagaaaaaatagagcatgttgtgttgaaatgggaaacggcacgtgccaaagagtacgagatccaagtgtcgaatgatgcgaggaaatggaaaacagtctatacaaacaaagatggacaaggcagtacagatgagataaaactttctccggttactgcacgctatgtgaaaatggcaggagttagccgtgccacagactttggatattcactgtatgaatttgaaatatatggtaagaaacaaaagaatgttgaggaactgactccgctccatttcatccggttagaactgactgacgcaaatggtaatttgatttcagataatttctattggagaaacggcgtgacagatcttgactatacagctttgaatacattgccggaagcagaactgtcgtgcaaattagttgataagtcaatgttatccgaagggaagatgaaattgtcggtaaagaatcattcgaaaactgttgcttgtgctaaccggataagattggtgaatacggctacacaagaaagaatccttcctgttatcatgtctgataattatataactttgatgccgggtgaagagcggactatttctgttgaggcggaaccggaaatgttgaaaggaggagtcagtgttttgctaaaacaatatggtaaggctgaacaaaagaagttggatatatgatatacgtagaaaactaaggggcacctttttaatttgaacaccagaagacattacctgtcctgtcttctggtgtttttaatttccctctatattgtgcctgatatattcaggaagagtagaaagtgaactttctttcttgaataacctgcttgatttaatagacaatgatcagtttattaatctattatgtgtacttgcttaatatcttttggaactaacaacagttcgtttcacatacgtggtcctatcgcttcacatacgtgatcccattagctcacgtacgtagaccgaacgctccacgtacgtgaaactaagaaatgttactgacaaagtttattagtcttgccttcttcatatattaatgttaccgacatttgttttatttgtaccatgataaatagtcctatgtatgaacagaatgaagaaaataaggctttagagttgaataaataagtgagcatacttgatttgtagtgggataggggtgacaatagaaacttataaaattctattatcacccttattatcaccagttattatcaccattacttgcttgattgatagctgtttatctttaaaaagtgacaagtgacaataaaaaactgtttttttcttagtgggagttacttgaaaaataaaacatttattttagtggttaagtaaacttgaatcgtcttttttaataagattcttttttattcaaagttggaaaagagaatattttgaaagataaataattaaatttgtaataaagtgtataatcaaatgaatagtaaaataaacgtaaaggtctttttcctgctatttctaatctgtgtttgttctaatagcctgtacgcacaatcaattccaccctttaaaaaaggagaacgggtagtctttgttggaaatagtataactcatggtggacattatcattcgtttgtgtggttatattatatgactcgttttccaaacaaaccgattacaataatgaatgccggaattggcggtgagagtgcgtgggatattaaagatcggttggactacgatgtttttgacagaaaaccgacttatgtaactctgacttttggtatgaatgacacagggtatgatattttctggaaggagaatgctaaggagttgtcggagcaacggattgaaaaatctttggaaagctttcgggaaatagagaagcgcttgctggcagagaataaaatgaccaaagtgctgataggtggatcaccttatgatgaaactacgaaattgaacagtttactttttcttcataaaaatgatgctattttaaagataattgatgcccagcgtaaggcggcgaagaaaaatggatggggatttgtggattttaatcagccgatggtacaaataagtctggaagagcaaaagaaagattcgacattcactttttgtagagtagatagaatccatcctgataatgatggacagatggtgatggcttatttatttttaaaggcgcagggactggctggagtcgaagtttcggatatttcaattgatgcaaataacaagaatctattaagtcataggaattgtaaggtctccaaactaaagaaagaagctggtggtttaagttttgattatttggcaaattcacttccttatcctttggattctattccaagacatggttggggaaataaaaggtcacaacgtgatgctatggatttgataccatttatgaaggaatttaatcaagaacgtttgcaggtgactaatttagaaaaaggacattatcggctgacaatagatggattgtttatcgataatgtttcatctggacagttggaagatggtatcaatttggccgattatcccaatacaccccaataccagcaagccatgaaaatcatgtatctgaatgaagaacgttttgaagtagaaaaacgtttcagagaatatttgtggacagaatattcgttcttgaaaaaggaaggtctgctgtttgctgataatgagaaggctataaataaacttagggagtatttacctaaagatggttttctgaggatgagttatgagtggtataccaaagcgatgtatcctgagatacgcgaagtatggagtagatatatgaagatcatcgtcgatacaatttataaaatgaataagccgacaactcataaagtcaagttgacaaagataggttgagtaatgcattatccattataagagtgttggggtgatgatccatagctgtaatattcgcagaaacttatttatgaggaataaaaaactgttactaggtataggaataatgtgttgtctttggtgtttgccaaagattgtacatgggaaagaaaacaaggtctctttttctttagtggagttaaaatgtgagaatatggttgatcctttagggattgacaacgttactccccatttgagttggaagttgaaaggagatggggtggtggatggacaagcattttacgaaattcaggtagcgtcagatagtcttctattaattggggggaaggctgacttatggaaatcggggaagttgaagtctgatgtttctgtgatggtgccttatcaaggcttacctttggcttcgcgttctttatgctactggagggtacgtgcctgggatcggaaaaggcatgtttcccaatggagtccggtggcgcgtttttctgttggtcttttgaataaggaacagatacacggtgtctatatcggttcatcaccggaaggaggcaaagtttgtgctcctttacttcgtaaaaaagtgcaaatagatgaactggcaacgacttttctgtatgtgaattcgctgggatatcatgaagtatatgtcaatggaaagaaggttacgaagaatgttcttacccctgcagtctctcaactgaataaacgttcgttgatggtcacttatgacgtatcttcttatttgagaaaaggagagaatgacctgctgatatggcttggacaagggtggtataagaaaactacttttggtgctgcttatgacggtccgttggtaaaagcggaactgaatatgctgagaaatggaaaatgggaagtattgactgcaactgacacttcttggaggggatgcgaaagtggctattcggatacaggtaattggtgtgctttacaatttggtggtgaaagggtggatgggagaatagtgccgacagatttttcaacttattctctagataaaatgaaatggtatcctgtggtggaagtaaatgtaccaagacacattgtttcacctcaaatgtgtgaagctaacaagatacatcaaacgttgcaacctgtttctatcaggaaacttagtgaagatacctggttggtagatatgggaagaatacagaccggatggtttgaaatgaagatgccgatgttatctgcgggacatgaggtcacgatggaatatagcgataacctgactaaagaaggagaatttgacaaacaaggtgaaagtgatgtctatattgcaggtggacggaggggagaatattttaggaataaattcaatcatcatgcttatcgttatgtccgtatctccaaccttccggcaagaccgaaaactgaatggataaaatctctccagatttatggcgattatcggcagactgcgactttcgaatgttcggatgctgacttgaacgccattcataatatgattcaatatactatgaagtgtctgacatttagcggatatatggtcgactgtccgcatttggagcgggcaggctatggtggcgatggaaattcgtctacaatgagtttgcaaacaatgtatgacgtagcaccgactttcacaaactggatacaaacatggggagattcaatgcgcgaagggggaagtctggcccatgtaggtcctaatcccggtgcaggtggcggtggtccgtattggtgtggatttattgtacaggcgccatggcgaacgtatgtgaattacaatgatccgagattaataaagaactattatccgaaaatgaaagaatggttctcatatgtggataaatatacggtggatggattgctgaaacgctggcctgatactcaatatcgggattggtttcttggtgactggcttgcaccgataggagtagatgcaggagcacaatcttctgttgatctggtaaataattgttttatcagtgaatgtttggggacaatggaaaaaatagctctgatgcttggggaaaaagaggaggcagagaagtttgctatgcgcaggaagaatctaaatgagttgattcatcaaaagttttatcatccgggtaaaggtatctattctacaggttcacagttggatatgtgttatccaatgcttgtaggagctgtaccggattctttgtacgatgatgtgaaaagaaagatgatgactgatactgaaaagcagcacaaaggtcatattgctgtagggttggtaggtgtcccaattttgacagagtgggctattcgtaacagggaagttgactttttatatcaaatgttgaagaaacgtgattatccaggttatctgtatatgatagataatggtgctacagcgacttgggagtattggagtggtgaacggagtagggtgcataactgctataatggaatcggaacctggttttatcaagcaatagggggacttagaatagatgaatcgataccaggttatcaacatgtatttattgatcctcaaataccgaaaggtttgacttgggctaagatggcaaaagatactccatatggtgtgattgttgttgactgggaattgacagataatattatggatcttcaagtggatattccagttggggttactgctacactctgtattcccaatgaggctgtgtcctgtatgatggatgggaagaatattcgcatagaaaagaaaatgattcaattaaaagcaggtaattttaaatattatatttacatgaaataatagatacgtatgaaaaaacatttattatcagcgcttttagcgatgtgtctggttactacggcttttgcccagcaagggaaagtgtatgagacacgtaccgtaaaaagtaagattctgggaatggaacgtagttattcaatttatttgccagcaggctatgacgaaggagatggtagttatccggtattgtatttgcttcatggattaggagataatcatacgggatgggtgcaatttgggcaggttcagtatattgcagataaagcgattgctgaggggaaatcagctccgatgattattgttatgccagatgctgacacggttcataaaggttattttaacttgttggatggaacatataattatgaggacttcttttttcaagaattgattccgcatatcgagaaaacgtatagagtgcgtgctgaaagtcgttatcgtgctatctccggtttgtctatgggaggtggcggagcgttgttttatgcccttcattatccggagatgtttgttgctgctgctccgttaagtgctgttggaggggcatggacattcgatcagatgaagagtcaatcagatttatcgaaggtgtcagaagaaaaaaaagcggaagttttcgggcaaatggatatacaaactatcttggagaaatctccgaaagaaaagctagaccgtatcaaatggattcgttggtatatcagttgtggtgatgatgatttcttatcggtaacgaactgtctctaacataacacgttgttacagcatcaggttggtcatgaatttcgtatgaaagacggcagtcattcgtggacttattggcggatggaattaccagaggttatgcgatttgtttctagaatatttactcaatattgagcgtaagtaaagtgattcttaacaaaataggctttgaagatcaaggccttttatcgtatgaattaaaatttatagatatttttttatttctttttagtggtatttgcttgtttactcgttcttaatataaacattgttttttatgggtttattttaggtaaaaggttaggattggtgtttgattggttttcaagtttatcctccggttaaaatttgctcctcattgctcttactacagccggagggagcttgtaaaataccgtaggtcaagataggtagactgttttttaaaggtaaaaaggttttgttttcagttaaaaacagaaaaataatgactagaatacaaaatcatatgacgaaaatagttcgaatattagttttcgcatttctgatgcttatacctgtttgcggtgtagcgcaggataaaattaaaatagcatgcattggcaatagtataactgaaggggctgacaattatccgactcctttggctcgtatgcttggaaatcaatatgaagttggcaattttggaaagtggggccatactttattgcgaaaaggtgatcatccttatatgagtaccgatgcatttatcaatgcacagaaatttcaaccgaacgttgtaattattaaacttggtacaaatgattccaagccggagaactggaaatataaggatgaatttgaaactgatttagagtatatgatcagcacttttcagaagtgtggatctaaaccaaaaattattatatgtcgttgtattccggcaagtaataatttatatgggatccgtaatgaaataataaaagatgaaatttatccgatacaaaagaaagtagctaggaagtttcatctgaaattggtagatctgtatagcccattagaacataaagttgattcaacttgctatgtatgggataatgtacatttgaataagagcggttcgcttatattggcggagcatatatataaagctattacaggtaaaaaagctcctaaattggaaaatgcatttgctaactagaagaaaaatcatactataaaacgacacatgaggcgatatatttattttgtttttttattatgttgtgctgttaatctattgttaactagttgtgtacgacagaaatatgttgtaatggatatggtacaccataatccgggtgaggctatgacggaatcgaagtttctcgatccttcttttttgaaaaaaaatgaatatggagcaaaagtttttttcttgtttgaggctgcacagtttggaattgattggaagagttttgatccttctttattcccggatacgactgaagccggacgttgggtggcagaaaaagcagaaataatacataaaaaatatgatgcagcaaaaaaggaagaccttcaagtatactgtatgcttgatatgttagtacttccttctttgctggtagaaaaacatagaacagaacttactaacgaacaaggaaaacttgatatatcgaaaccttacactcagctttgtattcgtgaattgatgaaggaaatgtttgaaacgtttccacaattggatggattagtgattcgtactggagaaacttacctgcacgatgctccttattatgtaggcaatcatccagtacaaaatggtatgtatgatcatattacgttaattaatttgttacgggaagaggtttgtgaaagacgtaataagaagttgttttatcgtacatgggatatggggcaattgcattcgatccctaaatattatttgtccgttacagacagtatagaaccacatccaaatctttatttctctatcaagcataccatgacggatttttggagatcaacaattactgatcctgatatgaattataatataatggataaatattggttggaagaatcaggacaatatggtgttccttttaatccttgtataggtattggtaaacatcaacaagtagttgaagtgcaatgtcaacgtgagtatgaaggaaagggagcacatcccaattatatcgctaaaggagtaattgatggttttgaagaatttaagaaacctggtataaagaagccgtattgtttaaaccaagtgaaagataatcccttatttaagggtgtttggacttggtcacgtggcggtggctggggaggtccttatatcaagaatgagttttggatcgaattaaatgcttatgtcatctcacattgggctagtaatcctttgaaaacagaaaaagaaatactatatgattttgtaaaagcaaaagggcttcccgagtcagaatgggagatgttccgtcgactttgcctattatcagaagatggagtgataaaagggcaatatagtactatgggagatacttatgttaattggacacgtgatgacaccataacgggagatgtatatcaaaagagttattttgatcgtatgattgaaagaaatcaagtaaatgcttatctgaaagaaaaggaagaagctgttcgtatttggaaggaaatagaactgatatctcaaaaactacattttccctcagaagaattgaatcattttattcgtatttcctgttcgtatggacgcattaaatatgagctttttgctgtttcgtggcagattatgctatgcggttatgtggcagatacaacaaaaaagtcttttaaccggatagagatggataaatatattactgcatttgatgatttgtggaaagaatggaacgacttatctctagaaaacgataattgcccttcaatgtataagatttcttctaacttttttggttttcctgtaggtatacaagagaccattgataaatacaggaaatagttttcgttttttcttcttatatgttatagaatataaaaaaataaatgaatattacttagtggttagtattattctagtcgtcttactattaatagtagcaaaaagtatgagaaagaaacataaaataacgaaagtaaaattatgatcattattattatataaattcttaaaaacggtattttctatgagaaacttattacaaaaatgttttaaatggcagtggcttgtctgcttggctgtaggctgctgcttttcgtcttgtaaagatgatgaagagtcaacttcgggctatgatccgaataagccgattgtgttgactgatttttatccgcccgaaggaaaacttgcaactcaagttattcttaatggatcgaattttggggatagtaaggaaaatgtgaaggtctttttcaatgataaagaggcttctgtcatttctgtgaaggatgatagaatgttggtattggctcctaaacgtgcatctacaatagaggacccagaatgtgtggttaaagtacaagtacatgaacaaatagaggagtacaagcagacatttgattattatatccagactactgtgactacgttagtgggaggaagtacatcggcacaggtgaatccaacaggaactataccactatctgaagcacaatttagagcaaatattgataggtgtatttgtgtagatcaggataaaaatgttttctttttagtagataatgatggaaagtttgctgcatttatgttaaatgaggaggctgataaattaatatctctaaagtcagatattaatgcgttgtttaactctcctgttttggggtataacagtaaggatgatattgtctatcaattctgggctaatagagatagtcatgaagtttattattttgaccctaagacggattatgcaccaactacagctataagttctatttcatgggatgatccaaattttccaaatattgaaggatttggagtatgggcagccaagtgtaattttacaatgggaccagatggaaaaatgtattcaagaatgttaggtggaaatctggtacggattgatgtagagaatgctagaggagagaatctaacgaatggggatttggttggaaccaaggatggtagtgcttatggacttgttttcgatcctcaagatgagaatgttttttatttctcaaataatgataagcattgtatttataaatatgatttacgtactaaagaatgtgcatgttgggctggtcaagaaggtaaaagtggatatttggatggaccaataggacaagctatgtttaataaacctggacagatgtgtgtcgattcagaaggtaatataattttgactgataccgaaaatcactgtattcgtaagataacaatgagtacaggttatgtatctacattagcaggaaaaccccaaaattcaggttatgtaaatggtagtgcagaagatgctcaattcaaaaagccattgggaatttgtattgataacgacgatgtaatgtatatcggcgactcagagaatcgtgctattcgtcgattagctgtcgaataaataattagtgaaactttatatttaatataatatgaatcgaatatttgtaatttttgctttgcttcttgcgtttgtagcacaagtacatgcacagaaagagcaaagctttatgttgactggtacagtcttcgatgaatttaatgaaccagttccgggagcaaatgtatatgttaaagataaaccaggtgtgggaataacaactaatattgatggtaaatttcggttaaaggtaaatatatatgatatagtggttgtgtcttttttgggatatgaaaactatgagcaacgtttgacgaataaaattgacaatgttaaagttaccttaaaaccggctacggagaatattgatgaagtagttgtagtaggtatgggtacgcagcgaaaggtcagtgttgctggtgcaattacaacgatggatccagcgcaactagaggttcctgctacaaatatagttaatacactagcaggtcgtgttgcaggtgtgattggagttcaatctagtggtgaaccgggcaaaaatatttccgagttttgggtgcgcggaattggtacgtttggtgctaatagtggtgcattagtgttgattgatggtttggaaggtagtttgagtcagatagatgctgccgatgttgaaagtttttctgttttgaaagatgctgcggctacagcggtgtatggtagtcgaggtgcaaatggtgtagtattggtaacgacgaagcgtggtttggagtccaaattgaagatcagtggtcgtgctaatatgacaatctcacatttaaaacgtttacctgaatatgttaatgccactcaatatgctgaaatggcaaatgaagcttctgttgcaaccggattatctcctatttataacaagacagaaatggatattataaaatatggcttagatccggatctgtacccaaacattgactggcaagatgttattttaaatcccaattctttccagcaaacttattatgtaagtgctcaaggtggtagcagtgttgcccgttattttgcaagtttaggaatgtcgaaagaatctgcggcttataatccatccaaagatagtaaatacaataaaggtgtaggctatgatacttataattatcgtttgaatttggatatagatttgactaaaacaactaaagtctatattggaacaactggctatatgtcggtgaatactcgcccgagcatgggggaatattctagaggagtcagtttgacagattggctatggagttcacaggcaaagactactccaataagctatccattacgctattcaaacggatattatcctgctgcaggaactaaggatgaaatatctccgtatgttctattgaattatacaggtaatgctagagaacagaataccaggaatttagttactttaggtattacacaggatttgtcgatgattactaaagggctatcagctaaagtacagggatcatgggatacacaaagtttatttggagaagcacgctataaaatgccagaactaaatgaagctttgaaggagcgtaaccctaatggaaccttgagttttgagaaaatagctgatgagaaaaccgttacatatagcagtgctgcttgggtttggaggaagctatatttagaggcaaatgttaattatgaccgtacctttggcgatcatcgtttaggtggtttactgttttattatatagaagatacatctgaaactggtgcagataaaagtatgaatgctataccaaagcgttatcaaagtctttcgggccgttttacatatggttttaaagatacatatttttgggatttgaactttggtttgaatggatctgaaaactttgaaccaggtaaacaatatggattctttccggcaggagctttcgcatgggtaccatcttcatatgaatttatacgtgaaaatgtaagttggttgaattttctcaagcttcgcgtttcttatggtgttgttggtaatgaccgcatcagttctagacgttttccttatctgaccctaataaaagaagaaaatgcttcaaatccttggggagggattggtagcttaacagaagaacaagttggtgccaataatttgatgtgggaaaaagcaaagaaatttgatgttggtatggatctgcatttgtttaaagataaatttactttgactttagattattttaaggatacacgagatggtatttttcaggaacgtaaacaaattcctgattatgtaggtttgattcaaatgccttatggtaatataggtcgtatgaaaagctggggtgctgatggaaatatggaattctatcaacagataggaaaggatgcacatgtgatattacgtagtaattttactttgagtaagaataagatattaaattgggaagatacgaagaagccttatacatatttggaaaataatggttatgccaataatgtacaacgtggatttgttgctatgggattgtttaaagatcaacaagatgtagaaatgagtcctacacaatttggtacggtacgtcctggtgatattaaatatcgagatataaatggtgatggtaaaattactgatgatgataaagttcctttatttgcttattcaggggtaccacagttgatgtatggtattggtgctgagtttcgttataaaagttggacactaaatgtcttgttcaaagggacaggacgtaataagttcttatatggcggttcggatggtagaaacttcgatggatacatgccatttaatcagaaggataaaggaaatataatgacaattgcttataatccggagaatcgttggatttctgctgaatattcaggaaatcaggctacagagaatccaaatgctcgttttccacgtttgtattatggaaaaaatgagaataatacgaaaccttctacattttggatgggtgatgcccgttacttgcgtttacaggaattgagcttggcatataatctaaaagttcctgcattacaacgtattttgggcattaattccatgaatattcagttgatgtgtgaaaatttggcagtatgggattctgtaaatatattcgatccagaacaagcgacatcttgtggacaggcttatcctttacctgcacgttattcattgcagctatatttgaatttctaatacgatgtataaacttaatagaaattagttcatgaaaaaatattttatattatcggttctgttattggtatccggcttttttgcttcttgtaattatttgaatatagatgattattttgaggatacctttcaagaagattctatttatgcaaataagcgtaatattgaacgttattttaatggggctgccgctctgcttcctgttgtcgataaaatttgggaatatgggaacactcctggagttacaggttcagacgaggctgtgagctgtggtgattggaatggtatggttgttatacaattctctggaacgaagttaatgaataatgagattacttctagttcaatgggcggttggacatgggatttcaatatttggcctaaatgttataaggtgattcgtaaggtgaatactatattgccacatattgatggtgttcgtgatatgaatagttttgaaagaatggaatttcgtgcaaaatgccgtttcttaagagcttatgcatattatttaattttgcaacagaatggtccaatgattttgttaggtgatgaaattgttagtaataatgaggaagcggagtattatgcaagaacgcgtaatacgtatgacgaatgtgtggattatatttgttcagaatttgatgaagctgctaaaaacttacctgatgctaccacttcgatggatcaatatattcctacagaaggagctgccttagctttagctgctcgtgtgagattacaagctgctagcccattatataacggtggagaggcagcccgtagattttttggtgattttacccgttgtacagatggagatcattatgtttctcaatcatatgatgaacgtaagtgggcacttgctgctgcggctgcgaagaaggttattgatttaggacgatatcaattatatactgttgctgcttctactgatgctgaacatcctgaatcagggaattatggtacatatgtagtcactctaccgcaagaggttcctactgcagaatttccaaatggtgtagggatgggagataaaaaagtcgtagatccgtatcgctcttatgccgaaatgtttaatggagagcttgctattaatcaaaatccggagttcatatggtgtagttctacagcgcaggttggtagccatatgggttacgtattcccattgaattttggaggatcttcttgtttatgtgtacctcagcatatagtagaccaattttatatggcagatgggcgtgatattaaaaattctagtagtgcatatccgtatatatcccgtccttatgataagacttgtgtgacgacagaagacaaagttttatctgaaggttataaaatcagccaaggaacatatttggcatatactaatcgtgaaccacgtttctatgtgaatattggttactcacatgcttggtgggcgatgggatctactactgaaagtgctaagaaaaatgttaatattgattattggaatggagctaattctggtaaaaatcattctaataataatgtttataatataactggatatacttctcgaaaatatatcaatccacaagatgctatgagtggtagtggggcgcgtcaaaaagataagtcatttccgattattcgatatgcagaaatattgcttgcttatgcagaagccttgaataatttaactcaagcatatgaaattgatggtcagacttatactcgtgatacagaagctatcaaatattattttaatcagatacgttatcgtgctggtattccgggattaacagcggatgatttgattacagtggaagcttttaataaagttgttcaacgtgaacgtttgattgagttattttgggaaggacaacgttattatgatattagacgctggggaattgttgaagatttagaaagggaacctttaatggggttaaatgtagaacaggctgaatgggaaggattctatcagcccactgtcattcagtataaatcaataattgaacgtgatttcaaacctaagatggtatggttacctttacatttggatgagattagaaaggtttctgttcttgatcagaatcctggttgggataaataaaattttaaatgtataaactatgaaatatagaaattttacaaataaattgatgcttatggtaggtgtgacagctactgctgttctcacatcctgcgagcaagagttttatcaggatgaacagtatcgtaaggaaatttatattgttagtggagaagataatattttccaacgagaattttctttcggcggggaggaaataggatacctttctgtttatgcaagtggtacaactccaattgaaaaagaagtgatggtagaactggaaaggaatgaaactgtattatcggactataatcaaaagagatatggggataattacaaaaactatgtcctggagttaccagatactcattataaagtagatgattggagtataaaattatatccaaatgcaaattcatcttattctttatttccaattaaagtaaatattgatgggttggaacctgaagataattactttcttcctttaagaatagcttctgtttctgactatatgatttcttctgcaaggaggaatgtattgatgcagatacttatgaaaaatgattatgcaacgactaaggagaagagctactatactatgaatggaacaagattgagagtagctaaagatacttgggaacctttggacaaaaagaataatgctccagattataaaccaataaatgccacaaagttagttgctccagttacggaatatggtattcgtattttaacgggatctacacttacatcggatagaaaagaactccgtaaacaagggattgttgttacggtccatcctgaggagatgattgatgttcctgttatcgggagtaatggattgccaactggagaatatatccaatgtcaaaaagtgacattagataaatggtataatgtaaatggtggaattacagtgttaaatattgaggataccccatcatattataatccagagaagaaagagtttacgttgaattatcgttataattataactcaaatgattggtatgaaatgaaagaggtgatgtctccagtggctattgctaacgaaaataattgagtggctgataataaatgataaatcttatgaaaacaagaaatatatatagtcttctatatgtaactttcgttgcagtggtgttagttgcatgcaacgattatgacgcagcgcaaactgcatatgaagaaatagtggatagtgatgtaacgactactcctccaaatatagattcggcatgggaattacagctaattcctaatgtaggtcagcatagtggtgaggtttttgtttataaagacaaaaagtatgataagctatttactcgcacattgggatggaatggtggaattggtgtgcaatctacatcattgtctgatggaaatgttctatgggcttttaatgatagctattttggagttgtagatgctgaaacaagagcaagaggtaattgtaatttcccacataatagtattatggtccaaacgactgttggtggtagtcttggagaaacggatgatgatctaagatggttagttgattatatacaaactaatgatcctgatggagaaggttattatcaggcgtatacacacatagctccagatgagactattatggaagaaacatatgaagagcatttctatcagataggtggtgctacgatatttgataataatggagttaaagaacttcaaatgttgtggggggaaatggataatcatgaaggtaaaatgactcgaactggtacctgtttagctgtttacagtttggaaggacagccgggtaatagtacttatcttaaaagaattagtaaaaacgaagaattcaatacagatgatgttggctatggttctactatatggaaagatgaagatggacatatttatctttatgtaacagagaataacagaccattagttgctcgcaccactactcatgatttaacttctgagtgggagtattacatacgtgatttaagtggtaactttatgtggcaaaagatgtatccgacgaaagaggagagaactcgctctactataatggaaaataattatgtatgtagtatgccacagatctttaaaaaaggagattactactatatgataggacaagccgtatcttatgttcattctgtttatttatatcgtggtgagacgccttatggaccttttacagatcaaaaaattttgtttaatgtcccttatgctgtggataagataggtaatcagtattataaaaatttgcttagagtaaatttgcatctagaacttgcacgagaaggtgaattagtattttctactaatactgatgctgatactgctggagataattttgattttccgggtagtgctgacttttgccgtccttatttttatcgtgttttcaattgggaaagtatatatgatgaagatgagtgatagctactgacgaattcatcttggtaaattgatttagaaagtcatttcttcataaaagggagaaatgactttcttttttaatatgttctgagctttcctgcatacaagtaaatttattaataaaaaacatgtaattgttttagtggtatatcatttttaaatcgtcattagataaataacaataaagtagtacacatattaaaaagaactaataataatgaatattaccgtttttagagtttatcaactaaatttattaaccgctatttctatgtatatgaaaagcttattttatttattcctatctattgtaggtgcgtggcttttttcgtcttgctcagatgattttctgggtgagacagaaaccacggacttagatcaggcaaccgtattcgctgatagtacttatacggcagatttcttaaaccagatttatgtggatattggttttgatatccaacataatcggtataaagatcagtataatgatcatggaggattgcagactagttgtgatgaagctgcgtataaagctagtaccgggcttacgacagatgtaatgttcgctactggaacagtcaatcctgttactatttctgaagacgatgtttggagaattgcatatcgaaatattcgtcgagtaaatgtgttctttaaatatgcagatggatcccgaatggctgaagcggcaaaggaagagtataaagcagaagcacgctttttgcgtgcttggtattatgcaatgctattaagacattatggtggtgtggctttaattggtgatgatgtttatgaaactgtagaagaagcaatcaaggagcgtaactcttatgcggattgcgttgagtatatcgtggatgaagctaataaagctgcagaaacattgccagttgaaagaagtggaaacaaatttggacgtgtaacccgaggagcttgtaaagccttaatttcacgtgtacgtttgtatgctgctagcaaattattcaacggtagtgattttgcgcctgctgattttccaaaagaattgttagggtatcctacttatgataaggagcgttggaaaattgctgtagatgctgcccttgatgtgataaagatgaaacagtatgatttgtacattcgtaatgaagatgagaataatgaggcttatccgggatggggatattatgcacagttgttacctgctgattattatggaaaagtgggaacggaggtttattgcggtacaatctttgaaaagaaagcaggagctagtatagatacaaaccgatggtttgctcctcctagtacaggaggaaatggtattggagggtatgtttatcatgatttggctgaacttttcccaatggcagatggcacaccgactaaggatagtccagattatgaccctacgaatcctgctaacaaacgtgaccctcgtttcatgttcactgttacttatgatggatgcataatgaagagtaatatgcaggatactgaaattaatatatctgtgggaacacaacaggacgctatctatcgagggactccgacagggtattatacacataaattcttgaaattcggttcaatggcaaatcaaatgctttatggaggttcgcaagcacgaccattgatgcgttatactgaaattttgctgaattatgcagaagctgctaatgaatattatggacctgatcataaagatgtactaggagatcaagaaattagcccatatattgtattgagaaagatacgtgagtgtgctggcatagagcctggcgaggatggaacatatggaattaaaaataatatgagccaggctgatatgacagaagctattcggttggaacgtcggttggatttagcgtttgaaggacatcgtttctttgatgtacgtcgttggatgattgctgaagatacagataataggatgatgcatggttttgaaatcacaagaaatggtgagcggaagacaggaagaatcattgatactcgtcagcataccttccgtaaagcgatgtatttttatccaataccttataaagagactgtgaaatcaccggatttgttgcagaatccttattataaataggaatgattgttatattaaaaataagaaatatgagatttaaaatacaaactacggttttacttttcgtcttattaggtactgtgagtgcttgcaatacatttaaagatgaaatagctcctgattcttatatggaagtaccaaagcagttagatgggaagtggcaattaaaaactgttgtacgcaatggaacggatatatctgaagtgatggactttagtcagtttcgtctgattatgaataaagataatacatataatattgaaaactatctcccttttttagtaaagaaaaatggtacatggagaattgataatttgacatatccttttttcttaacttttcaggaggaaggtgctgaaagagaagctataactgaaatcacttacccgattgtacaagggaaacgccatataacccttacaattagtccgggatgctcgagcaactcttatgtttattcttttgaaaaaatagaagaatgatttaaaaagaaaagcttatgaaatattattttaaaaaacatagaataaaaatcttttttttgttggtactttccttaatagtctttggatgttcctttttgattaaggaggtaaatgttaaacaagagaacgaggccggagagatggttgcctatattaaggctggtgaaattgcaacttttacgtttagtggagaaataaacatcgatggtgatgcaagcaatgaaacgtttattgttggattcttggctccaagaagttggaatgtacgtcagaatgcaactgtgacatacagagaagataggtatgaaacggaagtggatcacaaaatgacagtaattccagatactgaacagcctgcaaattataaaggtatgagttggtcagcggcattgaaaaaaaaatatggtgtacgaggcaatgtcttgaacgatatggaatggattgcatttaaatcggataactatcctagtgtaaatggaacaatacattatacagtaacaattaagtgtaattcaggaaaaagcaacttaaaattccgaccaagtttttttatcaatcactctagtgatgggattggaggagacgaggctcattattctgttaaggatgctgatgattgctttgaagtggtagaaggatcaggtactgtgattgatttttgttctacgcactattatcaaattgaacctttgtctgctttacaagatgattatgtaacattcacttttcaaggggatattaataccaatgaattgataaaagctgagaatgtgtatatagaagctactgcttatacgatagaaggaaagatatatacagtcaatgaaaagagtgcgaaaacactaatgaaaagagaaacgaaattgccaagatataatgtaactctttggcctggtggattttttaacattccggacggtgaaacaatttctcgtatagagtatattttcacaaatgaagatggaacagtatctatttcccagtcagatgacagtagagataatgaaggagaagaggtagaagaaggaataaaagagcctttcgtattcgaatttcaatgtgaatagagtttaaccttaaaaaaagattatatgcgtaatattttgaataaaagaaatagtcggtactgtttcacatgttttgtaatgtggctactacttggcttgggacatttgaatgcggtggctcaagaagcaggaggaacggctaatattacaggtaaggtaatcgatcaatatggcaatcctgtctcgggtgttgtaatcacgatgaagaatactgattttaagactgtgacaggtgatgatggtacttttgaatttcagtataagaagggcaatatgcttcgtttttctcatccaggttttttacataaggaaattaaggtgaacaagctaagaaatcaggaacgtatttttaaagtaacgttgacagaagagttcgtgaaatttccagatgtaataaatggaccttatgatacgaaagataaagcaagctatttaggttcagctgctacggtttatacagatcaggttagttcattgatgggaactactattcttccttcattacaagggcgtttaccaggactagatattgtacgtactcgtggtgcacgtaagagtcaaattgaatccagttcttctggaaccatctttaactttaatagccctacattgggtaaagaggcatatagtgataatacggaatttaatgttctatcacgccacaatgcaccggtggtggtagtggatggtgtgcaaagagaattatattctatcgatcctgatgctattgaatcggtatcaattcagaaggatgctttgtcatctatgtttttggggatgcgcagttcccgtggtgcattagtaattactactaaagatcctatcaaacagggatttcagttatcatttactggacggtttggtgtgcagagttcagtgaaaaaactaaatccgctgtctacttctcaatatgcttatttattgaatgaggcgttgctgaatgatggtaaaaatcccttttattcttatgatgactttattaagtttcgtgatcattccagtccgtatacacatccaagtgtgaactggtgtgatgaactgatgaacaaaaattcgactactcagtcttataatttgaatgctacaggcggtaacaagtacgcacaatattttattagtgtaggctatgtaggtgaaaatggattatttaaaaatccaggtggagatgctcacgatacaaatatgacatttgatcgttatatgatttcttctaaagtgaacatcaatattactgatgatttgacagcaaaagttactttgatgggacgtatagaagaaggtacccaaccaggagggactggaaatgggtatgatgatattctcagttcaatttattctactccaagtaatgcatatcctgtgacaaatccagatggatcatggggaggtagtcagtcgttcaataataatttgttatcgcagactattaactctggttatataacagatggggctcgggatgtattgggagctattaatttgcgctatgattttggtaagttagttaaaggcttgtctgttcgtatggtaggtagtgtaacttctcagaatcgttcgactacgaaacgaacaaaaacttccgaagtttttgattatactattgataaggatggcaatgacgtttatactcggtatggagaaaagaaaacgcaatcaaattcatttagttctgtgtctacctatcggcagatgtatggtcagcttgctgttgattatgaacgtcaatttggtaagcacaaatttaaggccagtgttctaggagatacgcgaaatactcttactaactgggatcttcctgaatatccatcaaatattataggtgatgtctcttatgattatgcggagcgatattttgcacaggtagcattaagtgaaagttattacaatcgttatgctccaggcagaaggtggggaaccttttacgctttcggtttaggatgggatatcagcaaagagaattttatggaaaactgtgagtggctgaatcaactaaagatacgcggtgtgtatggtaagacaggtaatggtatgaataatgctgggtattatacgtattatcagacttattcctcaggaggtgatgattatcggttggggactaatttaggacaaagttcaggaagttttacagaaaaagataaactggcaaatttatatcaaacgtgggaaaaaggcaataaactgaatattggtgtagatatagctttgtttaacaacaaattacaggtaactgctgattattttaatgataaatattatgacttgttgcaggctcgtggaaaaagtatcgaactaattggccagaattatccagatgaaaatattgctaaagaacgttggtatggaggcgaattctcaattacctatcaagatcacgttggcgattttaattattatgcatctgctaactggagttgtgagcaaagtaaagtgttatataaagatgaacaaaaagtgccttatgaatatctgcgtactacaggtaaacccaaaggggcaatcttcggtttggtagcagaaggttttttcacttctcaagacgaaattacaaagagtcctgtaattgaaggatttaacaatattcagcctggtgatatcaagtacaaagatcagaataacgatggagttatcaatgactttgataaggtaatgattggtggcgataaaccactctcttattttggtattgatttaggtttcgaatggcgtggattagaattctcaatgttttggcaaggagtgtacaataaagatgttttaatgagtgattggaatttattggaaggttttcaaactcaaggacaagtttatggacaggcatatgagaatatgctggatcgatggactccagaaactgctgctactgcaactttcccgaggttgagtgctggtggtaataagtataatcaaggcaatggctggggctcttctttttggttacgttccggtaattatattcggttgaaaaatgttagtttaggatataacttacctgattcattctgtcgtaattatttgggtggagcacgtgtgaaagttttcgtaagtggacaaaacttattcacaaaagctgctaatgaactcgttgatcccgaagttagcttcggtaactatccgctacaacgttgcatcagcacaggtattaatgttaaattctaatatactatgatatctatgatacgaaataaatatttgacgctaatcggagttggattgttgtttacagctgtatcctgtaccgatgggtatgaaccagagccagttgaactggtatcaattgattttgtattttcaaaaaccgattctcttggtacgaatgcggtaaagtttatgaataatatttatgccacgttgcaaaacgggcacaatcgtgtaggaagtgattatttagatgctgcgtctgatgatgctatatctataaatgtttctgacccggatgtttataagttggcaatgggacggtatactgcgagtacacgtgttgaatcggatatgcgatggaaagagtattattcaggaatccgtaaggcaaacattctgattaatcatattgatgttgtcccttttatgctgacttataagaacgcaaagggagaaaccaaaccattgaatgttacaatgaaagcagaagcgcgtttcttgagggcttatttctatttcgaattagtgaaacgctatggtggtgttcctttgatgggtgatgatgtacatatattgggtgatgatatggagatcccaagaaatacttttgagcaatgtgtacagtatatttgtgatgaattagatgatattaaagatgatttgcgtaccaatccaatgcctgattttgaacaatatgcacatactcctactcgtgaggcttgtctagctttaaagtctcgagtactattatatgcagcgagtcctttatttaatgaacgtcctattgagattggtaatgaattgataggctatgcttcttatgatagagagcgttggaatgatgcggctaaagctgccaagacatttattgatgagtacggtccgaatggtaatggggcatatggtttaacacagtctacatctgatggcgataatcgggattttcgtgacgtctttttaggtttttataataaaactaataatcctgaagtcattttttatcgtccggggggggaagataagtctatagaaagcaataatgggcctttaggattttctggtgacaatttaggtaaaggacgtacgcttccaactcaaaatttggtagacgctttccctatgaaggacggcatgtttgctggacaaggtagtaaatatactcttaatcagagtaatccatatgaaaaccgtgatccacgtttggattatacaatactgcatcatgggtcatcttggttgaataatacgcttgatatttcaatcggaggagttaataatccatctaactctgctgaatattctaagacgggctattatatgtgtaagtttatgggtaaatttggtgaagagtctcaatatgggaataaaatacatctttgggttatgtttcgttatgcagagatgttgttgaattatgcagaggcaatgaatgagtacctttcttctccttctcaggatgtgtacgatgctatcattgcattacgggcacgtgctggtattgaatcaggtaatgatgaatctccttatgggcttaagaaaaatatgacacaggcagagatgcgtgaagtgattcaaaacgaacggcgtattgaaatggcatttgaagaacaacgatattgggatattcgcagatggagaattgctgaagagatatttaagaatcctttggaaggtttggagattagggtaaaaggaaatactacgagtttcaatgaagtggatgtcctaagtacgacgtttgatgtgaaacgctatttatatccgatcccatataatgaggtagttaagaatgataacatgattcaaaatccgaagtggtaatattatgaaaagactattattaatattagtatgtataagcctttttatctcggcgttcggtcaatcgttcgttttgaagggaattgtctcttcagccgacggtgagttgttgccgggggtaaatgtaaaaatacaaggtacaacagtgggtacaattaccgatattgacggtaatttccaattaaatgtaaacaaaggtgctgtattggagttttcttatatcggttttaagaaacaaagcattaaagtaaatagtcagcaaatgctgaatgtagaattggctcctgatcaaacaaatttggatgaagtcgttgtcgttggttatggtaaggctaagcgtataacgttgacaggtgcagttagtggaatacaggcacgtgagattcgtaatgttccaactagtagtgtacagaatgctttgacaggaaagctgccgggtttttttagtcagcaacagtctggtcaaccaggtaaagatgcttcagacttctttatccgcggtgtcagttcattgaataatgatggtaataaaccgttgattatggtggatgacatgcagtatacttatgaacagttgtctcaaattaatgtcaacgaaattgaaagtatatcaatattgaaggatgcttctactacggccatctatggtatcaaaggtgctaatggtgtattagtagtaaagactcgtcgtggggagcaaggtaaaccgaaaattaatgtacgtttggaaactggtatgcaaaccccagttcgtacgcctaaatttctgaacgcttacgaatctttacaattagtaaaggaagcacatacgaatgatggtactttgtctgatttcccgtatactgaagacgatatgatcgctttcagagatcatactgatccttatgggcatcctgatgtcaattggtatgatgagatttttaagaaaatggcatttcaggagaacataaatgttgatgtctcaggtggttctaagaaattgagatattttgtttctgcgggatattttactcagaatggcttggtaaaagactttgggggtaattctggtgatggtgtgaatcctaattattcctatcgtcgtttcaattatcgcactaatcttgattttgatgtgactgataacttcaatatgcgtttggacgtttcttcacgcttcatggatatcaatgaaccgtacaatatgaatgtaacaggtgagctttatgatttctctaaaatgcacccttattcggctccacttttgaatccggatggttcatttgcttatttatatgatacgcaagatagaaaaccgacattgaacgcacggttggcaaatgaaggatataaacgtactagacgtaatgataataatattttgtatggtgcaacatggaagatggacttcttaacgccagggcttgcagctgattttcaattggcatattccagtagtgatgaaaattatcgtgcagtgatgcgtacacgatatccgacttatcattacgattctgcaacaggtttgtataatatcaatccgaatggagtctatgattatgagcagtattttgtatataacagtacagataaagctatcaaagatttgaatatcaaagcatctttgaaatatgctcatgttttcaataatgcacatgatgtaaatgttatgtttttgtacaatcgtcagagtacaacaaatgaaaaggatgcagctgttcccaataatttcgaaggttatacgatgcagctaggctataaatataaaaataaatatttggtagatttgaacatggcatataatgggaccgatcgttttggtaaagataacaatttcggattctttccagcattggctataggttatgctatctctcaagaagactttttcaagaatgtagattggttgggaaggaatgtgcagttattgaagtttagaacttcctatggtcttgtagggtcagatgtagcaagcggcgatcgttatctgtatcggcaagtatataaaacaggtgattcttatacgtttggtgaaggtaacaactttggtgttagtggcatcaaagaaggtgatttaggaaatttaaatgtaacgtgggagaaagcgagaaagtttaatgttggtgtagatatgaatttgtttgataaattctccttgactttcgactggtttatagataaacgttatgatcagctagttaccagaaatgatattccggacatattaggtatcggcttgtctcctgaaaatgtagcagaaactaccaataaaggttttgatggacagattggttatcaagaccgttttggtaacttcaattttaataccaattttgtatttggttatgctaaaaatcgagtcgattataaagctgaggctcaacagaaatatgaatggttgagagaaacgggtagacagattgggcagccttttggctatcattggattggctattatacaccggaagatattgaaaagattaattctggtgctgcggacgctccggctaaacctgatattgctgtgcaggcaggtgacttaaagtatgcagatttgaatggtgatggtactatcaatgattttgataaacgtgctattggcaaaccgaacttgcctactacaacattaggatggacgattggaggaagttggaaagggtttagtatcagtgttttattccaaggatcgtttgattatagttttgctatcaatggaacagggattgagtctggtaagagtcagttccagccacttcaccaaaagcgttggacacaggaacgttatgaaaatggagaaagtattgagttcccacgtttgacaatgcaagatggtacaataaatagtgcttctgcttataattcggatttttggctgattaatgcatggtatattcgtttgaagactgttgacttgggctatcaacttcccaagacagcattacctaagttcttagacaatgtccgtttttatgtaaatgcttataacttactgacttttaccggttatgataaatatcagcaagaccctgaaattaagaccaatacagctggtgatgcttatatgaatcagcgtgttataaactttggagttcagttgggcttctagtaaataagtagggtttagataacaagagaataatgtttgctataaaaacattattctcttttacttttttaagaagttagtttagtggttattgtatatttgttcgtcataaagtaaattgaaaaattgtatactataaaaaagtagttaatatgaataagaattttgtaatctctctattctttctattagggagtgctacactctctgcacaagtgaaattgcttccgatattttcggataatatggtgttacagcaacaaacgcaagcccctatatggggcgagtctaagcctaataagaaagtagaaattacgacctcatgggatcagaaaaaatatactattcaggctgatgcacaagggaagtggagtacgaaagttgctaccccagtagcgggtggcccttataatattacaatttctgatggtaaaaaggtgaagctttctaatgtaatgattggtgaagtttggatatgttccggacaatccaacatggaaatgcaggtagaaggttggggtaaggtgaagaactatgaacaggagaaagaagaggcaaataattatcctaatattcgtttcttattggtagaaaatgcgatgagtcctacacctgttgagaatattacagtaaaagagaatggttggcaagtgtgtacatcaaagagtgtagcggacttttctgcagcaggttacttctttggacgtgatttgaataaataccgtaatgtgccaataggattgattgatacatcttggggaggaacaattatagaaacatggaccagtaatgaggcactatccactataccgagtatgaagaaaagactcgaagcattggtcggtttgcctgcatctcaggaaggacgcaagaaaaagtttgaagaagatgttgagacttggaaagctgaagttgaaagaattgacaaggggtgtgttaatggggaggctatatgggcagctcctgattttaacgatgcggcatggaaatctatgaaagttccaggtttgatgcaagaacaagatttaccaggatttagtgggcttgtttggtttaggaaaacaattgatattcctgctggttgggcaggaaaagatttgatcttgaatttaggtgttattgatgataatgattttacttatttcaatggtatacagataggacatacagaaggatggatggcacctagaagctataagattccgaaagaacttgtgaagaagggaaaagcggtgattgctgtacgtgtaatggatactggtggtactggtggtatcaatggaagtcctgaaagtatttcacttcatctttccgatacagaagctatccagttggctggtaattggaaatatcaggtttctttagatatgagagaggttgcaccaatgcctgttgatatgtcatggaatccgaattctcctactttcttatttaatgctatgcttaatccactgattccctatgctatcaaaggagccatttggtatcagggagaatcaaatgcgggagaggcttttcagtatcgtgatttaatgccgttgatgattactgattggagaaatcgctggggatatgattttcctttctatatggtgcagttagctagttttacagcgaaacaaacagctcctgttgaatctacttgggcggaattgagagaagctcaaactcggactttacatttgcaaaatacaggtatggctgtggcaattgatataggtgaggagtttgatattcatccgaagaacaagcaagaagtgggtagacgcttggcattagcggcccgggcgcagacttatggcgagaagattccttattccggtccgatatataaatcttataagattgaaggaaataaaattcgtatcttctttgatcatattgatggtggtctgaagacggcgaatggcgaaatgccgaaaggatttaccattgctggtgtagaccataaatttcattgggcagatgctgtgatcgaaggaaatacagttgttgtttcctcatctgaagttaccctcccggttgcagtacgttatgcatgggctgattatccgatatgcaatatgtataacggtgcggatctgccaatgtctcctttccgtactgatgattggaaaggtattacttatgtcaataaatagtaagtctttatttaattaatatattcaataataaaccatgaagaaactagtttatttaattatcttctttttgtattcgactgtgatgaatgctcagctaaaagatctggtacagtatgtgaatacgctacaaggtaccgattctaattttggtttgagctacggtaatacttatcctactacaggtatgccttatggtatgcatatgtggtctgcgcaaacaggtaaaaatggggatggatttaagtatatgtatgctgttgataagattcgtgcttttagccaatcacatcaatgtagtccttgggtgagtgattatgctgtatattctttcatgccgatggtaggggagctggttgtaaatcaagatgctcgtgctaccaagtttagtcacgataatgagatagctaaacctcattattataaagtaacattcgataatggcattactactgaaatggctccgactacccgtggtgtacatttacgtttttcctatcctactacgggagatgcttatttggtacttgacggatatacggatatgagtgaaatcaaaattgatccggctaagagacaaatctccggttgggtaaataatcaacgttttgtgaacgattcaaaatcattccgtaattattttgttgttcaatttgataaacctttcgaagattacggcgtatgggaaaaccaaaaggatgaagtgtttccacagaaattagatggagcaggtaaaggatatggtgcatttattaaatttaaaaaaggctcgaaggttcaggctaaagcagcttcctcatacataagtgcagagcaggctctgataactttaaataaagaactcggtaaagataagaatctggaagtaacgaaagcacgcggtcagaagacttggaatgaagtattgaatagaattgtagttgaaggatgtacggacgaacagatgaagactttctactcttgtcttttccgtgctaatttattctctcgcaaattttatgaacgcaaagaaaatggtgaaccatattattatagcccatataatggtaaaatttatgatggttacatgtatactgataatggattttgggatacattccgttctcaattccctttgacaaatattttgcatccaacaatgcagggacgttatatgaatgctcttttggcagcccaggaacaatgcggctggttgccttcatggtcttccccgggtgaaacaggaggaatgttaggaaatcattctatttcattgctggcagatgcatgggcaaaaggaattcgtgattttgatcctgaaaaagcactgaaggcttatgcgcatgaagcaatgaataaaggtccttggggtggtgctaacggacgtggattctggaaagaatatttccagttaggatatgttccttatcctgaatcaatgggttctagtgcacaaactatggaatatgcatatgatgatttctgcggatatcaacttgctaaaatggttggaaataaacattaccaagaagtatttgcccgtcagatgtacaactataaaaatgtctttgataagtctatcggatttatgcgtggaaagggtgttgatggtaaatggcaggaaccattcgatccactggaatggggggggcctttctgtgaaggaaatgcatggcattatacatggtcagtgttccatgatgtacaaggcttgattgacttgtttggaagtgatgaaaagtttactactaaaatagattctgtatttactattcctaacataattaaaccgggcacttatggtggagttattcatgaaatgaaagaaatggagttggctaatatgggacaatatgcacacggaaatcaaccgattcaacacatgccttatttgtattgctatgcaggtcagccgtggaaaactcaatattgggtacgtcagattgttgagagattatataattcaacagaaaaaggttatccgggtgatgaagaccaaggcggtatgtcttcatggtatattctgagctcattgggtatatatgctgtttgcccgggtacagatgaatatgtgattggcagcccattatttaagaaggctaccataactatggaaaatggcaataagtttgtgattgaagcaccagaaaacagtaaagaaaatttatatatacaatcagctactttgaatggcagacttttagataaaaactatatccattatgatgatatagcagaaggaggagtcttgaaatttgaaatgggaagccagcctaataaagaaagatgtacttcgaagtatgctgcgcctttctctttgtctaaagaataaagaatcaaagaataaagttcaataatacgatcgattttatccgaatagcgaaacagggtactattagtggtattcctgtttcttattcgaaatagactctactaaaagaacatccggaatgaaacataaattcttatttattttattattctctcttgttttagaaggaatggttacaacacaagctgtggctggtgactatgtccatcaagtcaatacgttgattggaacaaaaggtaccggactgacttccggatatctttatccgggagcaacttatccttatgggatggtacaatttactccatcttatttttccaaaaggtcgggattcgttatcaatcagttgagtggtggtggttgtgaacatatgggaaattttcccactttccctgtgaagggaaaactgaaaatgtcacctgataacatcctcaactatcgtataaatgtatctgaagaaaaaggacatgccggttattatgaggctatggtgcaagaggatatcaaggcaaaactgacagtgaccgagcgaacggggatggctagttatgaatatccggcagatcaacagtatggtacaataatcattggtggaggtatttctgcaactcctattgaacaagcagcaattgttattactgccccgaataagtgtgaaggttatgcagaaggaggaaatttctgtgggctccgtactccgtataaagtctattttgtagcagagtttgatactgatgcttttgaaaccggtacatggaagagagaagaattgatgccaaatacaacttttgcagaaggtgagtattctggtgtatactttacttttgatgtaaacaaaaagaagaatattcaatataagattggagtttcttatgtttcagtagaaaatgcacgtgaaaatttgaaagccgaaaatgcagaatgggatttccaaaagatacagaatcaggcggaggcaaaatggaatcattatttgggtatgattgaagtggagggcaccaatcccgatcgtacgacccaattctatacacatttatatcgttctttcattcacccgaatgtttgcagcgatgtgaatggggaatatatgggagcggatttcagagtgcataagtcacgttctaaacactatacttcttttagtaattgggatacgtatcgtacacaaattcaattattatccatgcttgatccggaggtagcttccgatattgttatttcccatcaattgtttgcagaacagtccggtggctcttttcctcgttgggtgatggctaatattgaaacaggggtaatgcagggagatccgactcctattctgattgctaatgcctatgctttcggagctcgtaattatgatccgaaacctatctttaagattatgagaaaaggagcggaggaaccgggttctaagtcgcaagatgtggagactcgcccgggattgaagcaatatttggataagggttattataatgcatctattcaattggagtatacctcagcagattttgctatcggacagtttgcattgcatgcagtgggagatgaatttgccagttggcgttattttcattttgcccgttcatggaagaatttgtataattcggacacaggttggctacaatcacgtaatccggatggatcgtggaaatctcttggtgaagactttcgtgaatctacttataagaattatttttggatggtgccttatgatattgccggtctggtagaaataataggtggtaaggaaaaagccgagaaacggttggatgaattctttacgcgcttggatgccggatataacgatgcatggtttgcttccggtaatgagccgagtttccacataccttggatatataattggattggtcgtccatacaaaacacaggaaatcattaatcgtgtgttgaatgagcaatattcaagtaagatagacggtctcccgggaaatgacgatttgggcacaatgggggcttggtatgtgtttgcttgtatcgggctttatccggaaatcccgggtgtggggggatttacggtaaatactccaatcttttcatctgtcaaggtacatttgaaaaaaggtgatattgtgataaagggaggttcagaaaaggacatctatatcaaatccatgaaactaaacggaaaatcatatgaaagtacatggatagactgggaccagctcaacagcggagctactatcgaataccgtacttcgggtaaaccggacatgaagtggggagcaaaggtcgttccaccatcttttccttaattaatgaattattataaagaacaatcatgaaaagaaaatttcaacatatagcttatttactgatggttgcagcagtgcttacttcctgtggagagaagaagcaaacatccgaattccccgattgggcatgggcggattttcaacgtccggaaggtattaacccaattgtctctcctgataccactactgttttttattgcccaatgaggcaggattcggtagcatgggaatctagtgatacttttaatccggctgctacaatttatgatggtaaagtggttgtgctttaccgggcagaagataattcggcggtaggaattggttcacgcacttctcgcttagggtatgcttattctgatgatggtttgcattttaaccggatgactgttcctgtattttatccggcagatgataaccagaaagaattggaatggccagggggatgtgaagatccgcgagttgctgtgacagatgatggcctttatgtaatgctttatacacaatggaatcgtaagcaggcccgtcttgccgtagctacttctcgtgatcttcagatatgggaaaaatatggtccggcttttgcaaaagcatatggcggacgtttttttgatgaattttccaaatctgcttctattgtcacaaaattggtagatggcaaacaagtgattgctaaaattgatggaaaatattggatgtattggggagaaaagtttgtgaacgtagctacttccacggatttgattaattgggaaccgatgcttgatgaaaaaggagactttctaaaagtaattactcctcgtgaaggtaaatttgatagtgacctgaccgagtgtggtccacctgcaattatgactgataaaggtattttattactttataatggtaagaataagtcaggtgcagagggtgatacattgtatactgctaattcttattgtgccgggcaagcattattcgatgctaaagatccgactaaattgattgaccgattggataaaccattctatattccggaatcagattttgagaagagcggacaatatcccgcgggaacagtatttatagaaggtttagtattccataatcagaaatggtacttatattatggttgtgcagattcacgtgtagcagttgctgtgtatgatccttttaagaaataaaatgcaatgaaaaagataggactctttttgtttgatatttgttttgcattgcaaatggtggcacaagaacaaaactacttcacaaatcctgttattcggggagatgtacccgatccttctgtcattcggattgaagatacatattatgctacgggtacctcttcggaatgggcgcctttttatccaatgtttacctcgaaggatctggtaaactggaaacaggtagggcatgtttttaccaagcaaccgtcctggacttctaattcattttgggcaccagaattgttttatcataataataaagtttactgttattatactgcccgccaaaaaagtaccgggatatcatatatcggagtagctacgtctgattctcctttacatgaatttaccgatcatggtccgattgtagagtatgggaaggaagctatcgatgcatttatttatgatgataacgggcagttgtatatcagttggaaagcttatggtttggatacgcgtccgatagaattgttaggatgtaaactgtccgctgatggtttgcatttggatggtgaaccttttactcttttagtagatgaaaagggaattggtatggaaggacagtaccattttaaagaaggcgactactattatatagtatacgctgcccatggatgttgtggtccttctagtgactatgatgtgtatgtagcacgtgcaaggaattatggtggaccttatgaaaaatattctggaaaccccattcttcatggcggagaaggagattataaatcatgtggtcatggtactgtggtgagaacatctgatggtcgtatgttttatatgtgtcacgcttatttgaagggagatggtttctttatcgggcgtcaaccgattttgcaagaaatggaaatgacggatgatcattgggtgcgtttcaagactgggaatttggctatagctgaacagcctataccttttgtcggtacaaagcaagagcctctttcggattttgaagataattttaaggggaatcaattgaaagttgattggacgtggaattatccttattcagatatacacgctgtgctaaagaaaggaaagttatttttatccggtactccaaagaataacaataaatatggtacagcattatgtttacgtcctcaatctccacagtatagctgtgagacgaaagtaataaacacaggcaaaggactgaaaggattgaccttgtatggcgatgataaaaacctgattgcttggggaattgaaggagataaacttattttgaaagtggtgaaagacgatattgagtcagtactttatgattcagcttttgcaagtaaagagatatatttgaaattggaagttgaacaggggtgtatattccacttttataaaagtctggatggaaaaacatggcaatctgtgcagaatacccctttcaagggtaaatccttgattcgttgggatagagtgcagcgtccgggattactacattatggagataaggatgtaccggcagagttttcttattttaaaatgaagaatttaaaataaaaagaaagtagatggtgataaaatttttagtttatactattaaattatccctcatagtagattaacagtatttgtaaaatatagattgataacatgaaaaagtttttagtattagttgcagcagtttgcatggcatatactactgcgtttgctcagaccgtgaaaccttttaaggaaggtgatagagctgtgtttttaggaaatagtattacggatggtggtcgttaccattcatttatctggttgtattacatgacccgcttcccgaatatgcctattcgtgtattcaatggaggtattggtggtgatacagcgtatgatatgaataaacgtttggatggtgacatttttagcaaaaatcctactgtattgatggtgactttcggtatgaatgattccggttattatgaatataatggtgataatgcgaaagaatttggtgaacagaagtatcaggaaagcatcaagaacttccagcagatggaaaaacgtttcaaggaattgccacatactcgtatcgtaatgacgggaacctctccttatgatgaaactgcgcaaataaaggataatacggtctttaagaaaaaaaatgagactattaagagaattatagaatatcaaagagaatctgctgcaagaaatggttgggaatttacagattggaatgcgcctatggtagctataaatcaggaacttcaacaaaaagatcctagttttactctttgtggtaacgatcgtatccatccggacaatgacggtcatatggtgatggcttatcttttcttgaaagcacaaggttttgctggtaaagatgtggccaacatggaaatcaatgcaaataagaagcaagcagtgaaggcagaaggttgtaccatctcaaatattaagaaaataggtaaagatattagttttgattatctggcagaggcgttaccatatcctttggatactattgcacgaggctggggttctaagaagagtcaggcagaagttataaaagaagttccttttatggaagagatgaatactgaattgctgaaagttaccggtttgaaggggcaatataaactgttgattgacgatcaggaaataggaacctgggatgctgctgatttggcaaagggtataaatttagctgcagaatctaaaactccacaataccagcaggcattaactatcatgcacctcaatgagtatcgttgggaacttgaaagaacatttagagaatatgcgtggtgccagtttggtttctttcaacaaaaaggcttattgtttgctaatgacagaaaggctattgaagtgatggatgaaaatgtagagaagaacatgtggttgaaaggacgtcgggatctttattcaaagatgatgtttaaagaaattcgcgacgcacgtgaacaagagatggatgttctgatttccaagatctacgaaatcaacaagccagtagtaagaaagattgttctgagaaaaatataatatttctttagataagaaaggtttgaattggtgtatggtggtgccggctaatagtcggcaccttttttatgtatgatatttgatttaatttcttttccagaaatcggaactgaacagcagcaataccgtaaacaactccagacgtccgagaagcatcaaaaaggagagcaaccatttggctgcatcaggcaattcactccacgagaaggcagggccacacgtgccgagtcccggtcccatgtttcctatacttgatatgaccgttccgatagattcgagaaatcccactccgaagcccatcatgacaagaatgctgataatggcgatgattgcatacaaaaatgtaaatgccagtacggtagactggatagagggggagatcacctgtttattcacccgtacgggcaatactgcattgggatgcagaatatgtttaaattcatttttggcaactttgaagaggataaccatgcggatacatttgataccacctgtcgtactgcctgcgcaagcacccattatcattacgataagaagacagccccagagaatggagggccagagcatatagtcggcagtggcaaaaccggttgaagtctgtagggagattacttggaacagagatttccggaatgcttcttctgctcccatcgaactggtctgataaagccagactgctatgaaaaccgtgaaaaaggcaacagacataaaataaaacttcagctcggcatcatggataaacttctttattttcccattgaacatcagcaataatagcgtgaagttgactcccgagaggaacatgaaaacagatattacatagtctatgtaaggcgagtggtaatattcgatacttgtctgcttggtggagaacccacctgtactggtcgtggtgaaagcgtggcagatactgtcgaaaagtcccatgcccccgaataccagtaatataatcaatgtccccgtcataccggcatagatgccccagatccatttggcggtaacaccaatacggggatgtactttgtcatgagtcggcccgctggcttcggcggcaaatacctgaatacctcccataccgaaaatcggaagaacggcaatcgtaaagaatacaattcccagaccaccgatccactgagtcattgcccgccagaaaaggattccgtgaggcatcgattctatattattcatgatggtggcaccggtactgctgaagccggacattgtctcgaagaaggcatcggtgacacttggaatatacccgcctatataatagggcaacattccaaaaaaggagaaagcaatccaggctacactgacaatcacatatccatcgcggcggttgagtgacttttcggcccctcttccaatagcaagcataatcacacctacaaaggccgtgatagctgatgaaagcagaaaactgtttaaatcatcttccttgtaaaatagtgaaacaccaccgcaacacattaacatagccgtttctatcagtaacagaaaccccatgatgcgatatatcatcctcgaattaatcattttttaagtaataggtattaagtaataggtattaagtaataggtattaagtattatgcgccaagtatcagatataatgtcaagtacaagcagctacggttattacctattacctaatacttattacttattacctaatacctattacttaattaaagaacttctcaatcttcttgatcatcatactcaggcagaatacaacgacatggtctccgggacgaatcagcgtatctccggttacgagcactccttcgccattgcgaatcatacctccgatggttgttcctttgggcaatcccagatccttgattaaatttttagtaatctttgctccggcgggtacggtaaactcagccacatcggcgttggcaaacgtcaggcatttgacattggatacatcggcatccagcatcatctgataaatgtggctggcggcaatcattttcttattgatgaccgtgccgatatcaagactttccgccatgccgatatagtcgatattctctacttccgccaccgtcttttccactcccatacgtttggcggcgagacaggcgaggatgtttgtttccgaattgtccgtcaaggcgacaaatgcttcggtattctttaaaccttcttcgatgagcaggtccatatcacgaccatcgccgttgatgatcatggttttgtcgtccaataattcagtcagccggttgcaacggttgatgtcgttatctacaatttttacctgcatataatccggcacgtactgagcggtacggacggcgatacggcttccgcccatgatcatgacgttgcgtacatcggcataatcctccttgccggctattttccggatataaggaatatatttgcgtgtagtggtgaaataaacaatatcgtgcagtttgataacatcgtctccgcgcggaatgatggtttccgttccgcgtttgatggctaccacgtggtaagggatgtccggtgcacccagttgatggaggggaatattcagtatttccgctttttcgcgcatcttggtaccgatcagtatcaaggcgcctccgcagaattcccaccattgacgtacccagctcatacgcatggaagatacgatttctttggcagcaagcatttccggatagatcaatgagtctacacccagtttccggaagaattccttgtttttgggcagaagatattcgtagttgtcgatgcgggcgacagtctttttggcacccagattggtggctagcatacaggcagtcatattcctgctttcgtcgggggtgactgcgatgaacaagtccgcttctttcacgcctacctctttcagtcccgagatggaagaaggagaagccgtgacagtcaacaaatcgaagttggcgctgagggcacttagtttttcttcgtcatcgtccatcaggataatgtcctgtttttcccgggacaataatttagccaggtgggtgcctacgtttccggcacctgcgataattatcttcatcttcagttagttaattcttttattttgctcatgtcgggcagaagttcacattgcttcagcaattcttttgtcaggctgtcttcatccattccgcagagctgatataactcggctaccgtgccgtgttgcacgaatttatccggaattccgatgcgtttgactgtcggggtatattcatggtcggccatgaattcaagtacggcacttcccattcctccctgaatcgttccgtcttctatggtgacgatgtggcggaatgtgcggcccacttcgtgcagcagttcttcgtccagcggtttgaggaatctcagatcatagtgggcgatgcttcttcccgattcggactcggcacgggcgatggcactccttgctttatttccgataggtcctatgctgatgacagctatatcttttccgtccttcaatttccgtcctttgcctacaggaatttcttcaagcgggcatttccagtccaccaatacgccacggccacgcggatagcggagtacgaacggacctttatccggcagttgtgccgtgtacatcagtcgtcgcagctcatgctcattcataggggaggcgatggtcagattaggtatcggacgcagataagccatgtcgaacgcaccgtgatgtgtcggaccgtcttcgcctaccagtccggcacggtcgagacagagaactacgggaagattctgaatagccacatcatggataatattgtcataagcccgttgcatgaacgatgaatagatgttgcagaaaggctgcaagccatcttttgccattcctccggagaaggtgacggcgtggccttcggcaatacccacatcgaaagcccgcttgggcattttggacatgaggatgttcatcgaacagccggaaggcatggcgggagtcacacctacgatccttggattggcttccgccagttccaccagtgtatttccgaaaacgtcttggaacaggggaggcattccttccgtattggctacgaaacgctctccggtgacgggatcgaacttgccgggagcgtgccattcggtggcgtgtttctcggcaggggcgaagccttttcctttgatcgtgtggagatgcagtattttgggacctttgaggtctttaatgtcacgcaatacccttgaaaggttctttatgtcatggccatcgataggaccgaagtagcggatgttcattccttcgaatatattctgttgctgggcggccattgacttcagactgttgccgaagcggatcagtgccttgcgacgttcatcgttcaggatgccgagcttgaacaacaggcgggaagccttgaaacgcagttggttgtagcggttcgaggttgtcaggttgaacaggtattgtttcataccgccgacactgcggtcgatagccatgtcgttatcattcaggataataagcaggttgttcggggtggtagaagaattgttcaatccttcaaaagccagtcctccgctcatcgaaccgtctccgatgatggctatcacatgacgttggtcgtctcccttcttggcggcggcgacagccatgccgagggctgcggagatcgaattggaagcgtgtccgcaggtaaatgtatcgtattcgctctcttcgggagaagggaaggggcgaatacctcccagtttccggttggtggagaatgcttcacgccgtcctgtgaggattttgtggccgtacgcctgatgtcccacgtcccatacaatacggtcataaggtgtattgtagacgtagtgcagggctacggtcagttccactgttccgaggctggcagcgaagtgccccggattgcaggagagttctttaataatgtcttgccttaattcatcgcatacttccggcagttggtctacttccagacggcgcagatcatcggggctgttgattgagtttagcaagttatatatcggttcattcttcatgattcgagaaaatttggtgcaaaaatacgaaaaagaaagcggaagccctttctttttacctaaattcttattgttaaagcgaagtacgagggtggaatggcattcggtcgttggtatattgaagtatgtgccgtcgggttcccggaagaactgtaactttctttttattatgtgaaatgtggattaatattactaatcaaatgaaatctctattagggaaataaaagttgcatgaaaaaagagaacatgaacttgcagaaacgttcgtatcgttattaataaatttgatgatcgtttattatagacgtgtcttccgtttattagaaactctaaaatgagattttgtaggaaatagattgaattaatgcaacaaaaaaggctgcaaacttcatagagcttgcagcctttgggctatatcaatcgtcttattccttagtaaaatgagaaggaataagctgtatttgttgtaatatgatactgtattttatccatgttttctattcttttatatccgttattcattgattttctgttttcggtctacaaatatacaacataaaaagccatttgtcaagccttgaatagatttgtgattaaaataaagcggaatatcgtatctttgtcgtacttttgcaagagagaaacaatcgaaagaaggagaatatatggattttcaaacaaaggtagaactaccggcgggcttgccgcctgtcagtcatgcggaacggattcttttgatggggtcttgttttgcagagaacatgggcaggttgctggcagaaaataaatttcgcgttgacatgaatcctttcgggattctctataatccgctgtcggtctctacggctttggtggagatattgaaggggaaggtgtatcaggagaaagacttattcctatataaggagtgctggcatagtccgatgcatcatggtttgttctctgcgtcatcgccggaggaagtacttgaaaagataaacactcgcttgtcgcaggctcaccgttcggtccacgaacttgactggctgatgctgactttcggcactgcctatgtatatgaacagaaagaaacaaggcaggtagtctccaattgtcataaactgccggagagctgcttcaaccgccggattctttcggtagatgagattgtgaacgaatatacttcgttgataaccagtatggtggcgcgcaattctcacttgaaggtcttgttcacggtcagccctatccggcatatacgtgacgggatgcatgccaaccagttgagtaaatcgaccttattgcttgccatcgaccgcctgcaacagctctttccggatcatgtgttctactttccttcttatgagatcgttttggatgaactgcgtgattatcgctattatgccgatgacatgcttcatccgtctccgttggctgtccgttatttgtgggaacgcttttcggaggccttcttttctgccgaaacgaagcaggtgatcactgccatcgaagatattactaaagacttgtcacacaagccttttcatccggagtcggaagcgtatcaacgctttttaggacaaatagtgttaaaaatcgaacgacttaacggaaaatatccgtacttagactttcaaaaagaaacagaactatgtcatatacgattgaatccatagccgaatatatcggtgcacgccgtgtcggagagcatgaagcgacgattgattggctacttacagatagccgctctttgagctttccggaagaaacccttttctttgctttgcccaccaaacgtaataatggtgcacgctatatctccgaactatatgatcggggagtgcgcaacttcgtggttacggaagaagactttaagagaatggagaatggagaatggaaaatggagaatgctatgcagcaggatggtgcgcagcctactcccaactctcgactctccattctcgatttctccaatttcttgatcgtggcgaatcctttgaaggctttgcagaagctggccgaggctcatcgggagaatttcaagattccggtaatcggtatcacgggcagtaatggaaagaccattgtgaaagagtggttgcatcaattattgagtccggaccgctgcattgtccgttcgccccgcagttataattctcagatcggcgttcccttgtccgtctggcaactgaatgaagaagccgaattgggtattttcgaagccggtatctccgaaatgggggagatgggggccttgaagcgcatgattaaaccgactatcggtattctgactaatataggcggtgcccatcaggagaatttcttctcattgcaggagaaatgtatggagaagctgacactctttaaagattgcgatgtggtgatctataatggagataacgagctgatcagtaattgtgtggcaaagtcgatgctgacagcccgtgagattgcatggagctgcaaggatatcgagcgccctctttatatcagcaaggtgacaaagaaagaagaccatactgtgattgcttaccgctatctggatatggataatatcttctgtattccttttatagacgatgcttccatcgaaaatgcgttgaactgcctggcagcctgtctttatctgatgactcctgccgatcagattaccgaacggatggcacggctcgaaccgatcgccatgcgcctggaagtaaaagaaggcaagaataattgtatactcatcaacgatagctacaattcggacttggcttctctggatatagcactggatttcctggtacgccgttcggaaaagaaaggactgaaacggacacttatcttatcggatattttggagacagggcagagtacggctacgctttaccgtcgggtagcacaactgataaagagccggggcatcaacaagctgatcggtgtaggagcggagatttcttcgtgtgccgctcgcttcgaaggtacgccggaacgatacttcttccccgatacagacgccttgctaagatcgggcattttcaaaacccttcattcggaagtcattctgataaaaggttcccgcgtattcaactttgatctggtatcggaagaactggaactgaaagtgcatgaaacgattctggaagtgaacttgggtgcgatggttgccaatctgaatcactatcgctccatgctccgccatccggagacgaaaatgatctgtatggtgaaggctgctgcctacggagccggatcatacgagattgccaaaacattgcaggagcatcatgtagattaccttgctgtagccgttgccgacgaaggctccgaactgcgtaaagcaggcatcacctcctccattatcatcatggaccccgaactgacatcgttcaaaacgatgttcgattataaactcgaaccggaagtgtacaacttccatttgctcgatgcactgattaaggcggccgagaaagaaggaatcaccaacttcccgattcatgtcaaactggatacgggtatgcaccgtcttggtttttccgtcgatgaaattccgttgttgatccgtcgtctgaaaagtcagaatgcggttattccccggtcggtattctctcattttgtgggaagtgattcggcgcaattcgacttcttcacccgtcagcagattgaactgttcgagaaaggttcgcaggaattgcaggaagctttctcacacaagattctgcgtcatatctgcaatacagccggtatcgaacgttttcccggtgcgcagtttgatatggtgcgtctggggataggactctatggggtaagcccgatcgacaattcgattatcaataatgtaagcacgcttaagactacgattcttcagattcgggacgtgcccggagaagatacggtaggctatagccggatgggacatctgacgcgtccttcccgcattgcggcaattcctatcgggtatgccgatggcttgaaccgccatctgggacgtggcaatgcttactgtctggtgaatggcaagaaagctccctatgtaggaaatatctgtatggatgtctgtatgattgacgtgacggatatcgattgcagggaaggggacaaagctgtcatcttcggtgacgacctgccgataaccacactttcggataagttggggacgatcccttacgaagtgctgaccagcatctcgaaccgtgtgaagcgagtctactatcaggactaaagcgcaggcggtaaaaacagaattatatgtagtagaatagtgaatggaagactataaaggttaacgatggataaatgggcggtaaatgataacgggtatacttaaattatttcccgtttcccgtttatagtttcctgtttttcttttatagtctgccgtttttctttatatttgcaccaactaataaacctctataattaataaacatatgacaaacttattattattaggctttttgcctagtggctctgaatggatcattattgctcttgttattcttctccttttcggtggtaagaagatacccgaactgatgcgtggcttaggtaaaggagtaaagagctttaaagatggtgtgaacgaggcaaaagaagaaatcaataaggcaaaagacgaaatcgacgcaccggcagattcagctaagaaataataagcaatggcagaaatgaccttctgggatcatttggatgagttgcgtcgggtactttttcgtgttatcggagtctggtttgtattggcaatcggctatttcgtagcgatgccttatttgttcgaccatgtaatactggcgccttgccataatgattttgtattttacgacttactacgctttatcggtcagaaattcgatttgactgatgaattttttacgcaggagtttaaggtgaagcttgtcaatatcaatttggcagctcctttctttatacatatgtcgacagctttctggatgtcggtagtgacggctatgccctatattttctttgaggtctggcgttttatcaatccggccctttatccgaatgagcggaaaggagtcaggaaagccttgaccataggaaccggtatgttctttatcggggtgcttatgggatactttatggtatatccgctgacactccgtttcctctctacctatcagctgagttcggaagtcgagaacattctgtcgctcaattcgtatatcgataactttatgatgctgattctctgtatgggactggcttttgaacttccgctggtgacttggttgttgtctttgctgggagtcgtcaataagtctttcctgcgcaaatatcgccgtcatgcagttgtcattatcgtaatagctgccgctatcatcactccgacgggcgacccgttcacactgagtgttgtggctattccgctttatctgctctatgaaatgagtattctgatgataaaggataagaaggaagttcctgagttggaagaagaagaggaagaagaaggcgtggcaaaagtctgataagccaattatttatcgttcgtttccccaagtgtgtgtcaaaagtcgatagtaactcaattgaggctgacttttgacacacacatgtaatttttatcatatcccttttgtcgtatggaaaatgaaggaagagaatcttatgaaattcttttagccgtttgtaaggcggatcatttgcagctgactattggctacaaacagatgcgcgacttgctggaaaggctttgccgcctacatatgcacaacggtagtctgcagatgaccgatctttccgcacgaattagttttgtagcggccaaagtggggctttctgtagcggagcaaaacagactgcataccttccgactgacctccaatgccattctgaaccgacaacaggaacctacccgcgaacaccttctgcgggatgcgaaaacgctggctttcttcatccgtaaactttttgaggaagatattccacaggaactgtatcgtttgcttccccggacggatgcaacttatatcgtagctcctccagcacacaagcaggtgcagcggatgcgcgtctgtttccagtattccgacgagcagtatctgtatgtgactcctttggatgaaatagctgacgaaccgttgcgtgtccgttacaatattcctcagatcaatgaagaatttgcggaaacctgtcagttgctctggcgccatgcacaactcaacttgctggatgtcgctgttgacgaagcaggaattctgaccccttcgttcattgtccttgaaccggattatctgcttgatatcagttcattggcagaatgttaccgtgattatggacatcatccggcaaactatttcctttcccgtcttcagccgatagagaatgcacgcccgttgcttttaggaaatatagccaaccttttcctcgatgagtggatacatgcggaaggggaggtggattatctgaaatgtatgcagaaagctttccggcgttatccgattgaactggctgcttgtgccgacctgcgtgatcgggagaaggaacgtcagttctttgatgactgcaaactccattttgatcatatccgtgagacggtgaatgatacttttcatgccgccggctacgaactggacaagacggatgccgtgctcgaaccttcttatatatgtgaagcgctcggcctgcaagggcggctcgactatatgcagcgcgatatgtcttctttcatcgaaatgaaatcgggaaaggctgacgaatatgcgattcgcggaaaagtggaaccgaaagagaataataaggtgcagatgctgctttatcaggcagttctgcaatattcgatggggatggatcaccggaaggtaaaggcttatctgctctatacacgctatccgttgctttatccttcccgtccttcatgggcaatggtccgccgtgtgatcgatctgcgcaaccggattgtagcggatgaatatggcatccagttgcggaacagcctggaatatacggcacaaaaactggaagaaataaaagcctcggtactaaacgagcggggattgtcgggacatttttgggagacgtatctgcgcccttctatcgataatttccaggagaagttgaaatctctctccactttagagaaaagctacttctatgcactctataattttataacgaaggaactttatacgtccaagtccggtgatgtggattatgagggacgtacaggagccgcttctttatggctttccactttggcggagaaatgcgaatcgggggagatcatctatgatttaagaattaaagagaatcacgcagccgacgaacataaatcccacctgttgctggtaccgtccggagaacttcagagaacggtggcggatgatgcgcagcacaccctccctaacttccgtcagggcgatgccatcgtgctttacgaacggaatgcggatacggataacgtcaccaacaagatggtattcaaaggcaatatcgactatctgaacgagaatgaaatctgtatccgtctgcgtgcgacccagcagaactcttccgtacttccgtctgatagcctctatgctattgagcacgatgcgatggatactactttccgtagcatgtaccagggactttatgcttttatgtctgctacaaaagagcgtcgtgatttgctgctctctcaacgggagccgcaatttgatgtggcattggataagcagatagccgaagctgccgatgactttactcgtattgctttgaaagcgaaagcagcaaaggactattttctgctggtagggcctccgggaaccggtaaaacgtcttgtgcactgaagaagatggtcgaaaccttttataaagaggaaggagcccaaattttattgctctcgtacactaaccgtgccgtagatgaaatctgtaaagcactttcttccattcgtccggaagtcgatttcattcgtgtgggaagcgagctttcatgtgacgagaactatcgggatcatttgatagagaatgaacttgctacctgtatgcgtcgtacagaggtttgcgaacgtattaaccgctgtcgtatattagtcggtacagtagcgtctatctccggcaaaccggaacttttccgattgaagcatttcgatgtggctattgtagatgaggctactcagatactggaacctcagttgctgggcatactttgtgccaaaggagaaaacggaaaagagggcgttggcaaatttatcctgataggcgatcataagcaacttccggctgtcgtcttgcagaatacggaacaatcggaagtatacgatgaagccctgtctgctgtcggactgaagaatttgaaagattctctgtttgaaagactgtatcgcacagcccgtcagcataccgatgcccatcgtacttacgatatgctctgccgtcagggacgtatgcaccccgaagtggctctgttcgccaatcaagctttctatgaaggtcggctgctgcctgtcggactgccgcatcaactggaagattccggaaatatcaaccggctgtctttctatccttcgcggcccgaaccgatgggttcttctgctaaaacaaaccattcggaagcaaagattgctgcccgtctggccgcaactgtctataaagaacactcggaagcatttgatgcctcccgcacattggggatcattactccatatcgtagtcagatagctttgatcaagaaggaaatagaagttctcggcatttccgaactgaatcagatattgattgacactgtagaacgttttcagggaagtgaacgcgatgtgattatttattcattctgtgtgaactatccgtatcagttgaaattcctttccaatctgacagaagaagacggaattctgattgaccggaaactgaacgttgccttgacacgtgcaagaaaacagatgctgctgacaggtgtgccgacgctgttggagcgtaatccactctataaaagtttattaaaattaatagagagcctccggaatattgcataatttttgcagacgttagtttttattctctctttatgcaattcattaacacctatttgttgaacaaacccctatctttgcaatacgtttttttcatagagatttagatttaaggttagaagaattgtggaagtcgtgagacttccctttttttcatcttaacgtttactatccttcattgtttgaatgtgcaagatattttgtaaaatagtacaggatggctatgaagaataagtaaacctaaaaagccttcttcgtgagaagaggcttttttgtttttggaactttttgaataaataattggttaaaaaaacaggaggacaaactcatgctgagtgccctcctgttttttattctatataattatatcggattaatccaatacgataggcttatatttaggaaccagtgctttcataataacccaaccgatcaggtaagccactgcgcatacacagaagattacaaagtaaccggccggttttccttcgaagcccatgaatgtcatcgcaggatgtacaaactgtgctccttgttccagtagttcttttgtcatttccacttctttgccgtcaaccattgttgttccggaagcatatacaaataagttacctgccactttctgaagaatcattgaaccgataccaccggccataccaccgataccggtgatacttgcaattgctgttcgggggaacatatcacctactgtagagaagatattagccgaccatgactggtgggcagctccgccgataccgatcaggatcacggggaaccacggagagaatgttcccaatggctgtgccagcaataccactaacgggaagaatgcgaaaatcaacattgctttcatacgtgccgcataagggttcatgccggtcttgttgatgaagatagtaggaagcttgccaccgtagatggataacatcgtgattgcgtaaagtgtgaagataagtcccattcccagaggatcggaagttttgataccgaattgggagttcaggtaagacggggtccagaacaggaagaaccaccatacaccgtcagtggtaaatttaccgaagacaaatgcccaagtttgtttgtagctgaaacattgccagaatctcatctttttctcgtctttctcctctgttttcggacctgcaccggcctcattctggtcttgttcgatatattcaagttcggctttgtttacgtgcttgctctttgaaggagcatcatacataaatacccagaagcccatccagataaaaccaagtccaccaataacgataaacgccatttcccaaccgaaagctttggcaaggataggaatggtgagcggagcgatcaaggcaccgatagaagcaccggcgttgaagatggaagtagcataagcacggtctttcttcgggaagtactcggcagttactttaatagcggcggggaagttaccggcttctccgagagcaagtatacagcgtgcagccaggaagcagtacatactgacagtagcgatggttaccaccacgtctccggtggctccggcaagttcggcagcactgtgcagtcctacctgcgcttctgttacaataccacagactgcgtgcagacaggcaccggcagaccatacgccgatagcccagaggaatcctttcttcgttcccatccagtccacaaagcgaccggcaaagagcatacatattgcgtaaacaatagagaatacggaagtgatagtaccgtagtgtgattcatcccagtgaaattccggtttgataaattcatcccaggtgagcgatagtacctggcggtcgagatagttaactgtagtagcaaaaaatagcatcgcacagatcgtccatctgtagtttgtcattttttcgcctgttttttgaaatgcattcatgataatggatttaaatagattttgatttgctgacaaaggtcggtatttcagctggattttttttgtaataattggtcaaaatcatgtataattcgttgcattatacatattatttgtacatagtaatgtattatcgtaacaatttggtctctttgggggaagaatatgacaaatccggaaaacttcattctctccccgtttcgaggaaagaatgaagtttttcggatcacttgatatgtgctaaagagctgcgcaaagattagcgcatttctgtatatttaatcttatccatgtcgccatagtcaagattttcaccagccataccccagatgaacatatagttgctggttccggcagctgcgtggatagaccattccggtgacatgatagcttgttcgttctgcatccatacgatgcgttcttcctgaggttcgcccatgaagtggcagatggagttgccttccggcacgttgaagtagaaatatgcttccacacggcgactgtgagtatgtgccggcatggtgttccatacactacccggtttcagttctgtcaatcccatttgcagttggcaaggaccttcttcaagtacgttgttaacaatcagctggttgataacgcggtcgttgctttcttccatctttcctgccgcgaaagaatttgctttcagagaacctttgcgtccgtcgatggtgatcaactgagttttgtactccttgtgggcagtagcggagttgatatagaattttgcaggtttgctggcatctttgctcttgaaagtaactttctgcttgcctctgcctacatacaatgcatctttgaagttcagcgtatattccttgccgtcaacagttacgataccttcgccgccaatgttgataacacccagttcgcgacgttcgaggaaatacttagctttcaacggatcgatagtttcaagtaccagctcttttgttgcaggtacggcaccaccgaagatgaggcggtcgtacatggaataagtcacgttgatttgatcaggaaccattactttttccatcaggaagctactacgcaggcggtttgtattatacgttttcacgtcttgcggattgcaagccacctgcatcttgtaatttacctgggcagaagcagacatagctgcgatacccatcatcattgcaattgctaattttttcatctttcgaatctttatttggattatacttatatttaatcgttagctgcgtttttcgcatcatttcttttcatgcggatacggttgtagactgccattcccagtgcaagggctacgaggatggcaggaccgataatcttcagactgtaagtcaggtggaagataccccagcagaagaggctggatgcaaagtcgagcgctccgccttcgaagccggcggggatatttactgtcgggtcacccgtagcggcatatacgtctttggcagccatcgtgaagaatcctgccagttctgttacgaagtacagacctacgatcaatgctaccagtccgatgatgaatgatttcaccacattacctttggtgataggcagaatcatcgggaataggtagaacataccagccagagaagccagcggtaagaaacggttacccggaaggatcactgcaaggaagatagtaaccgggatcaaaagcagggatacaaccagcgttgtcgggtggccgatgacaagtgcagggctcataccgatgctcaggcctgtattactcttatattttttagcgatcaattcgcgggttgcatcagagataggtttcaaaccttcaatgaaaaggctggtgatacgtggaatcaactccataaccgctcccattttgatacccaatccaaggatacccggaatgccgtccagtacttctttccagctggcacagcccaaagctccgataccgcaaccaatcacgatacccaggaataacggttcacccatcagaccgaatttcttcttcattccttcagagtcgatattcagtttgtcgaatcccggaattttatctaaaagcttgttgattacaatcgcgaacggaacgaagctctggcagaaaggctgcgggatagagataccgtccatcttatcatagaacttctgaaaagcaggagcagtcatgtctgccattaccaatgttataatgtagcaaatgatagcggcgaaaaatccccagaaaatactatcggaggcgaagtatacgatagccccgataaatgcgaagtgccagtagttccaaaggtcaatattaacagtacgggttgttttggtcagtagcattaacaggtttactcccagacaaacagggataatgaaagcgccgaccgaggtattataggcaactgctgctgccgaaggccatcccatgtcgaaaataccgagttccaatccgtagatttctaccattttacttaatgccggaccaagactactggtcaacaaggctgtgactacagataagccgacgaaaccgactcccaccaacaaaccgcttttgagcgctttggggagtttaataccgatacatactcctaaaattgtgaaaatgatcggcatcattactgccgctcccagaccgataatgtacttgaatacttcttccattctgttctatttttttctctgtttttaatgataaattactgtgtttccccagagggtattagttgtaaaccgtgccaaaagtacgaccttttccgctttattccaaaacgaaactcttaatttatcagttaatgcatcaaaaatggacatttttgacgtttacgtgcacaaaattagtcgtttccgtgcacgaaaaacaaaaaatacaccttcttaactaaaaaatcccactctgtttggaggaaatacactactttcgtagcatgaaaaaatagcatgtataatccttaaaacaataaaccatgagacgaagctctttttataaatttttgatattagtaataataatgtcaagcaccatttcactgtcggcgcagcaggtggatgaaaaactgccttggtcggtgcggatgactgaatcggagatgatccgttgcccggaatcctggcagcttgattttcagcccagactgaaatgggactattgccacggactggaattgggggcgatgcttgatgtatacgatacttatggcgacaagaaaatacgagattatgcaattgcttatgcagatacgatggtgcatgaggatggaagtattactgcatacaaattgaccgattacagtctggaccgtatcaattccggaaaaatcctgtttcgtatctatgagcagaccaaggatgaaaagtataagaaggcattagacttgctctatagccagtttgccggacaacctcgtaatgaagacggaggattctggcataaaaagatatatccgcatcagatgtggctggacggactttatatgggagctcctttttatgcagaatatgctttccgtaataatcgcccgcaggattatgcagacgtcataaatcagtttattacctgtgcccgtcatacgtatgatccgaagaatggtctttatcgtcatgcgtgtgatgtaagtcgcacggagcgctgggccgatccggtgacaggacagtcaaaacattgttggggacgtgcattaggctggtatgcgatggcgttggtagatgtgcttgattttattccgaagcatgaggccggaagagattcgttgcttgcaatcttggataatgtagcagttcaggtaaagaaactgcaagacccggagaccggtggatggtatcaggtgatggacagaagcggtgacaagggtaattatctggaatcatcctgttcggcaatgttcatatacagcctgtttaaggcagtacgtatgggatatatcgatccgtcttatctggatgtagcaaaggctggttatgaaggttttctgaaaaatttcattgaagtggataaagatggagtggtgactataacgaaagcctgtgcggtagcagggctgggagggaaggtttatcgttccggcgattatgactattatataaatgaaacaatccgtaataacgacccgaaagcagtaggaccatttattatggcaagtctggaatacgaacgtttgcaaaagtaaattctatcgatgaaaaggagtattttgaaaggaatggcgttgtttcttctgctttgttcaggaggaactttggcctgtgcacaacagcaaaagcaagacacaatagtcgtgtcacgagacggaacgggaaaatatcgggatattcaggaagccgtggaagcggtacgtgcttttatggattatacggtgactatatttataaagaatggtatatacaaagaaaaactggtgattccttcatgggtgaagaacgtgcagctggtaggtgaagatgccgaaaagacgatcatcacgtatgatgatcatgccaatatcaataaaatgggcactttccgcacttatactgtaaaggtagaaggaagtgacattacttttaagaatctgaccattgagaacaatgccgctcctttggggcaggcagttgcgctccataccgaaggagacaggctgatgtttgtcggctgtcgttttctgggaaatcaggatactatttatacaggatcggagggtagccgcctgttatttactaactgctatattgaaggaactacagacttcatcttcggcccttctacagctttgtttgaatattgcgaattgcatagcaaacgcgattcatatattaccgcggcttctactccgaaggaggtggagtttggttatgttttcaagaactgtaagctgacagccgctcccggtatcaagaaagtctatctgggacgtccttggagaccttatgctgctacggcttttattaattgcgagtttggcggacatatccgttcggaaggctggcacaactggaagaatccggaaaacgaaaagactgcccgttacgctgaatttaaaaacacgggtgaaggtgcggatgcttccggacgtgtgaaatgggctaaacaactgactgataaagaagcggtgcaatatactccgcagaatatatttaaggaatgcagtaattggtatccttataaataacatcagttcgatataagagtaatccgcatggtttcccctccttttggaaggaggagaattgagttactcaaatttatatcgaattcacgttaaatagaagtcataagggaactttaattttgaaccaacaaaataagattatgaaaaacagactgctattgctgtttatagtatttatccttttctccgcctttcgtgcggataagcccgtattgaccatcttcacgataggtgactctacgatggctaacaaaaatctgtacggtggaaatcccgaacgcggctggtgtatggtgctccccggatttttttcagaagatatacgtgttgataatcatgccgccaatggccgcagttccaaaagtttcatatctgaaggccgatgggcaaaagtgatttcccaggtaaagaagggagattatgtctttatccagttcggacacaatgatgaaaaggctgattctacacgccatactgatccgggaacgacctttgatgacaatctccgtcgtttcgtcaatgaaactcgtgctaaaggagggattcctgtgttgttcaactccattgttcgtcgtaattttgtacagccggaagatgcctcgattgccacagatgcccgtcgtgctccgggtgaacaggaactgccgaaagaaggaaacgtcttgtacgatacgcacggtgcctaccttgattctccgcgtaatgtggcaaaagagatgggagtggcgtttatcgatatgaacaaaattacccatgatctggtgcagggactgggccccgcagaatcgaagaagttgtttatgtttgtcgaacctgagaaagttccggcttttccgaaaggccgggaggataatactcatttgaatgtgtacggagcacggactatcgctgggctgactgtagatgctatcgcaaaggaaataccggaactggcaaaatatgtccgttattatgattacgtagtggcacaagacggaacaggtgatttcttcacagtgcaggaagcgataaatgcagtacccgattttcgcaagaatgtgcgtactactatcttggtccgtaaaggcacttataaagagaagattattattccggaatccaaaataaatatctctctgataggagaggatggtgtggtactgacaaatgatgactttgccaataagaaaaatgtgtttggtgagaatatgggaacttcgggatcgtcgagttgctacatttatgctcccgatttctatgcggagaacatcacttttgaaaactcggcaggaccggtaggacaggctgttgcctgttttgtatctgccgaccgtgcgttctttaagaattgtcgttttctcggttatcaggataccctttatacgtatggcaagcacagccgtcaatattacgaggattgctatatcgaaggaacggttgactttatcttcggatggtctgtagctgtattcaatcgttgtcatattcatagcaaacgtgatggttatgtgacggcaccctctacagatcaaggcaaaaagtatggatatgtcttttatgattgccggttgactgctgatccggatgttgccaaagtatatctgtctcgtccgtggcgtccgtatgcacaggctgtatttatccgttgtgaactggggaaacatatccttccggaaggctggcacaactggggaaagaaagaagcggagaaaaccgtattttatgccgaatacgatagtcatggcgagggagccaatccgaaagcccgcgcagctttctctcgtcaactgaagaatctgaaaggctacgagatggaaacggttttggcaggtgaagacggctggaatccgctaaagaacgattctgttaaataaacaccgaatatagatgtaagttcagctaaatcattatctttacaccattcaatatgtgtgtaataatgataaaaagaatcttatatctaattcttttgtgcctgaccgcacctgtagtgcaggcacaacaacacagttttttcacccattattctaccgaggatgggttgtctcaaaacacggtgatgagcatgttgcaggatcacaaagacaacctctggtttgccacatgggatggaatcaatcgttttgatggctataactttaaaacttataaagcacgtcagggcaattacatcagtctgaccaataaccgtgccgaccggatgtatgaagaccggtacggctttctgtggttattgacttatgacaaccgtgtccaccgttttgacccgaaaacggagacgttcgaacaggttccggcagcaggtgaagaaggtagtacatataacattcacgctattcaggtattgcccgatggtacggtctggctgctaacagaacatgatggagctatccgtgtagtcacgcttcctcagaagaactatacgacgaaatcagatatttattcaacgaagtccggtctgtttcctgccgatcacttttatcaggtctatcaggacaaagccggcaatcactggctgctgactgataacggtttgggaatgatacgccccggtgagcagcaacccgtgaactactttgtggagacgaaagggaaacaagacggcatgaatcaggcattttatgcggtccgggaatgtgaagacgatatctgctttgcttcagacagagggagaatctggtgttatcagaaacagggcggagagtttcgcctgctcgaacttccgacgaaagcccgcattacttctatacacaccgtgagcaatggcaatactgtagtgacaacagattcggacgggttctttctttgcaacctgaagacaaacaaacatacgcattattctcccgttacctgtaaggaattgtctgcacaaccgattctttcggcttatgtagaccgcacgtcagaggtatggttcgaacaggaagagccgggagttgtcgttcattttaatcctgccaccggcgtggtaaggcgtgagcagatgcgggtggaatatagtaacgccgatcgttcgcgtcccgcttttcatatccatgaagatgtacacgggcatatatgggtacatccttatggcggaggattctcctattttgatcgtgaccggaactgtctcgttcctttttatgatgatttgggcagtaacaactggcgcttttctaacaagatacatgccgctttttctgataaacaggggaatttgtggctttgtacccactccaaaggactggagaaagtaacattccgcaacgtaccgttttcaatgctgactcccgttccgcatgaatatgaatctttgagcaacgaagtgcggtcggtatgcgaagataaacaggggaatttgtgggtcggactgaaggacggaatgatccgcctgtacgactcgaaccggaaattcatagggcatctgacaggtaatggaaccatttcgatgacaggtacacctatggagggtacagcctatttcattatgcaggattcaaaagggattatctggattgctaccaaaggaaacggtctggtgcgtgccgaacagatttctcccacaagtatgtcttataaactgacccgttatcagcacgactccaacgatatgtacagtctgagtgacaacaatgtatattgtgtttatgaagatcatcatggtcgtatctgggcggctacttttgcaggcggtatcaactatatttcccagggagaacatggagagaccgtctttatcaaccaccggaataatctgaaaggatatccgattgatgtctgttacaaagcacgttttatcacttcggataataacggacgcctttgggtaggtactaccacaggcgccgttgcctttgatgagaatttcaaaaagccggaagatatacagttccaccacttctcgcgtgtcccgaacgatacgaagagtctaagtaataatgacgtgcattggattatcgctacccagcagaaggaactctatctggctactttcggagggggactgaataaactgatttccatcagcgaaaacggtcacggtgaatttaaatcctactcagtgctcgacggactttcttcggacgtcttgctttccatccgtgaagatcataaacagaacctttggatcagtacggaaaatggaatctgtaagtttgttccttccggcgagcgttttgagaattacgatgaacgtagtatcagtttccgtgtccgtttcagtgaagcggcttctacgctgacatccggcggagatatgttgtttggaaccagcaacggattattcatgttcactccggattctatccggaagagtagctatgtgcctcctgtagttttttctaagttgatggtagcgaatgaagatgtaattccgggagagaagtccatattgaaagtcgatttggatgatacacaggaactggtgctttctcatgatgagaatatcttttccgttcagtatgctgcactcgattatacgaatccgcagaacatacagtacgcatacattctcgatggtttcgagaagcagtggacttttgccgaccggcaaagaagcgtgacttatactaaccttccgaagggagattatatattccgtgtccgttctaccaatagtgacggggtgtgggtggacaatgagcgcatcttgaacattacgattctcccttctttctgggagacgcctttggcgtatgtgctgtatgtctgctttgtgctgctgattatttttgttgcggtttatatcctgtttaccatttatcggttgaagcatgaggtgtctgtagaacaacagatttctgatatcaagctgcgcttctttacgaatatatcccatgaactccgtactcctctgacattgattgcaggtccggtggaacaagttctgaagaacgataaactgccggctgatgcacgggaacagctggtagtggtcgaacggaataccaaccgtatgcttcgtctggtcaatcagattctggactttcgtaagattcagaacaagaagatgaagatgcaggtacaacagttgaatgtcgttgcctttgtccgcaagattatggataattttgagtcggtggcggaagaacacaacatcgatttccttttccagacagagaaagaggctttgaatctttgggtggatgccgataagtttgaaaagattgtgtttaaccttctgtccaatgcgtttaaatatactcctaatgggaaaatgatcaccgtctttatccgtgaagatgagggcacggtgtctgtcggcgtacaggatcaggggattggtattgccgaaaataaacgtaagtctctctttgtacgctttgagaacctggtggacaagaatattttcaatcaggcaagctccggcatcggtctttctttggtgaaggaactggtagagatgcacaaggctacgatttccgttgacagccggctcggtgagggaagttgttttaaagtggactttctgaagggcaaagagcattataatagttcagtggaatttattctcgaagattcggttgctccgctgagcatggaacgtattgtggatatcgctaattcttcgcttcagacagaagctgccatcgcagatgcaccggacctggaagtatctgctgtcaaagaagaggctgaggaaagcagttcgaaagagcttatgttgctggtagaggataatcaggaattgcgttccttcctgcgcagtattttcgcttcaacttatcgggtggtagaggcttccgagggtatggagggatggagcaaggctttgaagtatctgccggatattattatcagcgacgtcatgatgccggagaaagacggtatcgaaatgacgcgtgaacttcgtgcggatatgacgaccagtcatattcctattatcctgcttactgccaagacgacgatagaaagtaaattggaaggactggaatatggggcggatgattatattaccaagccttttagtgcgacttatcttcaggcccgtgtggagaacctgctgatgcagcgtaagaaactgcaaaatttctatcgtgatagtctgacgcatgtgacggtgtctgaaactccggttgctcaaggggagactttagcaggtcatgcatctgctgaacccgtaagtagtgcagcggaagagcctgcgatgccggaaatgtctcctaacgatcgtaaatttatggataaactggttgatttgatggagcagaatatggataacggggaattggtagtggatgatttggttcgtgaactggctgtcagtcgttcggtgttcttcaagaaactaaaaacgcttacgggactggcccctatcgagttcataaaggaaatgcgtatcaagcgtgccgcacaattgattgaaacgggagagtttaatatgactcagatttcttatatggtcggtatcaatgacccgcgttatttcagtaaatgttttaaggcgcaggtcggtatgactccgacagagtatcgggagaaagtcggtcggtaattggagcttcttgcagttttatctccttagaagtttcattgaataaatagcgttcagccgtttcagctttcttcggaaaagccttgatagaaggtgatagcggctgaaggcaccatttcgtacccttgcgtagacgtgctctgagcgggggcgtggtttcagttctttcaggtttatagtttgagtttctgcttttatagtcgataagctatgtatatcttaatttctgaacaaaggctggttgatatgtaggcaaaggctgactgacgtacgggcaaaggcttgctgacccgtcgactcaggcttgctgacgtgtaggcttaggcttgctgacctccgagctaaagtttgctgacaaataaggtgagaatgatagaaacagcgctgaaaatatgatgaatgaatagagcctctgtttaagtaaaatagaccttttacttttagtaaatagaacttctgattggaacaaacgcaggctctgtttttgaaactgaaagagctgaatgctgaaacctcttttcagagactactgctttcagctgtatctccttctgacagggattttgcggagattactgaaagaactgaatacctggatttcaactttatttagtaggtggctgattctttcattgttagcctgccaagcaggctttttatttgtattagagtaaatagaaagaagtacaagagttgttatgatgatgtactagagtcactccaaggatgtagaagatttaaggaaaagatgtataagaattggatgaatggtgtacaaaatgcgagcgaatgatgtacgtcattacttctttggaataataataaaaaagatagcgatgcccgaatacgagtatcgctatcttgagaaaagagactaaaatattatttgattttagcctcttttagcttaactagattttataaaatcttattttctccgtaagcccccgataaagtacccgtataaaaaagaatcgctatagcaaatcgaacaaagctatagtgattctgtatttatattcttgtttttcgttagagtattattagagttctttggagtttcccgattcccagcaatggggtagcagctcttttaggtctttctccttgttggctgcataatacggcaatagtgcaatcacctccgtgagccattcccgggggttaatgttggaggctttgcatgatgccaagagcgaacagattatggcagtgttctgcgcggcttcatggtttccacaaaataagaagttttttcttgataaggctatcggacgaatcgcattttcggccagattattatctattttaagcctgccgtctttcagataattcctcatacgtggccaaagttgatacgcgtaagcgatagcttgccccatccggcttttaggaagcactttcggataggctgtttccatccatttttccagttgctcaagtatgggaagtgcctgttcctgtcttctaagcatgcgttgctcataagtgagttcctcctggtcggcaatctgttcgatccgatagagttgctgtatttgagccagaacatatccggccagggattcattctcttctttggcaacctcgtaatgtcgccttatgtgggcaaggcatccgacaaggcacacctctttcttaccctcaaagatgttgtaggccgcatagccgtcactttgaagatatcctttgaaggtttgtaataatttccaggctgtttcctgtgagcgggaaccgtcatcataatgaaagaagaccaatccatccataaccgccctgactatccacaagtattccttaaccgctttatgattctgtttgttgataaccggtaatgtcgtttcgtccacctggatatagtcggccttcaatacctgtttcttcaactcttcatagagaggtttaagtaattcacaggcaggtttgaaccacccctgaagcgtgttttccgagatcttcaggcctaaatggtgaaactcacgcacctgacgatagaatggtacatgatattcatatttttgcaagaggatttcagtgagcaggctggcaccgggaagtcccttgtagataggcaatagcggaagaggggctataataacactgccctgatgcccctgaggcaaacttatattgtctttcaggccatacttgggacgtatgatctcttttacgtataatttgcccggttcaaattcaagtgtacgtgtgcgttcctcgcctatgcgcttgtatttatccggatcgactccttcgggttctatgacaatctccactacaggaaggccatccaacatgttgcggttctgacgcactttctttttgggagtcgtcgagcagacaggttcttgggctgcggcttcttccggtatttcgtgttccaacggctgaacaggtggatcgaacagtgatagctggttcggatccagatgggctaatttctcgctcttacggccgaataactgacgatttaaccaggctacctgagccagcagttcctgaagcttattttgcagctgttcgttctgccgggtcagacgctcgattgactcagactgggagctattagcctgctggagtgtggccaccaaaagttctaatgtttctgtctgagtcattcgtcatacctgttttgaacaatacaaaaatacagaaaagcaaccgtataatcaaggtttcacctgctgtttttcagtactgcatgtcactttttcgtaacgctttcagacgtttgagccttttggaaggttcgtcgttgattccctctaccatcagaaccaggtcacgccactgcatagggtacgacttgctttctttgtcataagagggaaggcggaaagtgccttcttcaagtcgttttatgtacaaaaccagtccgccatcttccgcgtgtagcagtttcattgtagtgcgctggcggttgataaagataaacacatcacctaaacggacatcatatcccattttatcatgaacaaccccgcataatgagttcatacctttacgcatatctgtcttacccggacagagaaagtagcgcatcgtgtcattcaggcaaaacatggcgattgcagagttgagtgagcaattgcatggccgcctgggattcagccataccactgaagtgggcgataataccaccggggaactctatccggatctcacccgtttgtatagcgccactatcacaggcagagtgggaagcaggtgaagaggtgaggctaaccggtgcaaactcctctaaagaggaagaatgcctatccatatgataacgcctcgataggccaaactttcctttccaatagtaaaagcttgattcggtataggcttcatttatacagaagtcttttatcgtcaaaccgctacgctgttgacgagacaggatttcaatgaattcttctttactcattttttgcatagtcttttttctggcaaagatcgagacttaaagatacaaagacaacgggtactttatcgggggcttacttttctccagcgtggatcaccaatttcattatctatgattgtttggttagatactttgaaattaccgtttgctgcatctgtaaagcctggatcaagagtgactccagttgcgtctaccactttaccggctccaccttcaggtattgatagtaaggaaggtgcctcgaaataatagttcgagttaaatgtcagattatcagttttagtatcttgactaaagaatactttattactcatgttagcaaaaatgcattttgtgatatttgcagtaaaatctttattaccaactgagttggaacggacatagaagagacctttacttgttgcttcaattccatacagagtgcaattcgatatatttatgatattgcctttcgttgaatgtctgtcaaaacgaataaaatcagaaccagagcaacaattatagaatgtggaatttttcaatgtaaactctgctataaaggatttcttcttttgatagtctacaaatcttttgccacttgccatatcatggaaaatacagttatctacagtaaatgtattgatagtaccagtttgtgtattatcattctctactaacaacgaaccaaatccagttacatcacaatttgtaacagttatatttccacctttactatcaagtactgtaataattgtacctccgtcactagcagttaaattaaggttctctattttgaaattgttacatccacttaatacaaacttgatattagtagttggacggttttctgcatataaaccttttatagtaacatctttggttaattctatttccaatgtttttgcagttccactttcatctgtatatatgaagctattattgtcgtctttaggtaataggacaatagtagcattagcctcggctgttgctatgattgttgcaagattgtcacccggataagcaggtaatgctccatccaagtttatgagagttgtgaataccatcgtaccacgagttttatcaccattctttaaagttgcagtataagtagtttcagactttaagtttttaatagtagcggcaccggctgcaatttcatcagaagtcacacggtgtgctgcaacatcatttggagttatgatgatttccgtagcaacttgtccggcgggccagcgaagtgttacttctgatgctgtcagatcttcttctgcaacttccagaagaatttgttctgcatctgttgaacgggtagcgctaacccatttggaatcagtaattccttctgctacactttttacccggatggagtatgatgtttctccttctaatcctgtaaccgtataagttgctttttcagattctaacgtagaaatagcagttcctgtaaaatcaggatcttctttaaatacttcgattacataggattgggctctatccatttcatcccatgttaattctatatttactttgtctctaactcttgcggtcagattagtcggggataatagacgatctaaatttaattcttttatgtcatctatatcttcacatgcagtgaatgtaacgctgcctgtcaacagtgtgataaaagcaaatgctgtgattatatattttttcatcttatcaatatttaagtgtatgaattaattataccaggaataatttttcaattccggattggcattaagattaacctggaagataggccaatacatatatttaaccgggtcttgtgcataaatagcttctatcttctcgtcttttagttggctggaagatatccatgttttcgtttcacccgaactgttggtgtattctgtgtaacctgccggattgatattttgctcatcgcggttcagaccgtatgttacgagactgccatcttcgattgtatttgatgctccgttgcgcgtccatgtgtaatcttccattttataatataaatgcccgcttaattcagcatattctccttgcaaatcacgtaaacgatacattttagctttagcctcatcaagtttggtttttaatagattccaacggatcaagtcagctttgcgaacaaattcaccgcaaaattccaaagcgcgttcttgaacgattgcatcaaacattgcatctttattaccttgaacagctgcgacatattggtctacttctgtattccaatcggcttgatcaaacgcacgttggcgaatctgtttcaaatatggagctgctgaggccggaccatttaattcgttttctaattctgctctcatcaatacgatatcagcataacgcatatattgtttattgataccatcgtcggtgctttcaatatagcggttcatccattcataacggagttttccgaaataccatttatctattgaattgagttcttggactcctttgttccatttgtaaggaacacatgttacatcacgtcgtttatccttttgggaataatcaaagaaaaagaaaggagtaggacctgcctgtccaccggattgtttgtagtttactatgacatcagcggtctcatgtcttaaaccgaaagtatatacttggcgtccacgtgcagtcggttcattgttgtatggtatttcccataatgattcactacctgctttaataatatcacgacagttatcaataaaaatatcttcgaaatttgtttttaaagccacatattttccttcttctgccattacgtctttacatgcctgcagggcgatagggtataatacagattttgctagttctggatcactgcttaatgaactgttaccatcggatctcaaagaataaccggatgcctgaaggcaaactcgtgctaataatccttttacaaaagctttgttgattcgttctacagtagtagttgcatccatttcgttgggccatgctaccatattttctgcttcctgtaaatcttttatcagttgtttgtagataacgtctttgtcagttcttgcagcatacattgtttctgtggttgttggttcaaagcgagcgggaacatctccccaagcgttaatcagatcaacatatgccatagcacgcatggtaagagcctcaccataaaggtgtgccatatttttatctgtcaaatctgcgtatgttctaagtccttggatggcaaggttagccttttcaatgccttgataaatattagaccatggttctttaccatcagcgagattcatctgactattattcgaagaaaccttataaaccgctaaatctgcttttccgtcacctacctgttcagaactactataccattctatgtcagtattataaccataccaaggcaaataacgagcacgatagttctgttcgccataatatatatatatgtttttaattgttccttctgctaaatcatagattgaaaatatattggagtcgtccatagatgaaggagactttgtatcaaacaagtcatcacaagaagtcataagtaaagaacttccgcagaatggcattgctgctattactgtatataataattttttcatattagtctttttttagaatgttaagtttaaaccaattacatattgacggctctttggatatgctgaataatcaacacctggggtcaatgcgcttttagtacgtgtagatacttcaggatcgaaaccgctgtagttggtaatgcagaataagttatagccggttgcataaaaacggagattctgtattccaacttttctggtcagagtttgtggcagtgtgtagccaatggaaagagtagctaggcgaaggaatgatccatcttctacagcccagtctgtcaacacatatttctgtgtccatggagaccacattgaggtatttgcattcattgccgccaattgtgtaggatcattacagatagttccgtcggcatttaggttagtccaacgtttctcttctgccatgacatcaatcatgttacggtatttatatttgcttgaagatgtatattcaattttgtttgcattatagatatcattaccaatactataggtaaagtttgcagtcagatcgaatccgtaaacacgggcattaacagagaacccaccactacagaatggattagtatcaccaattactttttggtcgtctttagtcactttattatcttcacttccatctacgttttttagtttcatagcacctggacggagatatttctcaccgatgatgtcagaagcatctgctacgccagctttcaatacccatttaccatcaatgaaaccttcgaagtcactgacttcataacgtccgtcacttacaaaaccgtaaatttctccgacagaatgtcctggttgtactttgaagtctgattgaatatctgttgatgcccaacctgaatcagcagaatagtccattaagctacctaaggatttaactttattcttattgaatcctacgtttgcattaaaactcaaagcataattctttttattgatggcattccaatttaaggttacttcccaacctttgttttctgtttcacctaaatttctgtattggaagctatatccaacaccggaaacggggaagttgattagcaaatcttttgtagtattccaataatattcaactgtaccacttaactttccgtttaaaagagtaaaatctaaaccggcattgcgagtatgggttgtttcccatttcaaatcaggattggccatttgtgcaccagtagtccaataacttgacatattattcatccagcctattgaagcaccggaaccagcagaccaaatagtacttgtttggtcacttggaatgttgttattaccagctgtaccataactaatacgaagttttaaatcatctaaccatgatttagtactttccatgaagttttcagatgacatacgccatgcaagagctgcggaagggaagaatccccaacggttgtcttttgaaaatttagaagagccatcggcacggaatgttgcactcgcaagatatttaccttggaaatcatagtttgcacgtgcaaaataggatagcaggatatcgtcagcattatagaatttgtcagttgagaaagctgtgccttgacttgataagttgaaagcttggtctgccgtaaatagttttggataaaaacgaacttcatctgtatccgtattacttttcaccttaatcaattcctgaccaaccaaaagacttaaactatgatctttgttctttagtatcttcttgaaatcgtaatttaaagtattagtattacggaaggtttttctttctttggaagtgaatacggcaataggctgattgtttccattgatgcgggagttgtaagttgtaactccataaaaacgtttgtctttattatagtaatgatctaaaccaaattcagtcttgaattttaagttgtcaataaactcccaagtaaaactaccgttataattaaaggtttgacgtgactgctgacgtgcattgtctgcaacggaaactaatggatttgttaattggagatcaggatcatacccatcgctcaaatctttgaaattgaacggggtataaatcataacgtctttcatacgagagtctgcactggaaacttcgcttttggactcgttagcacctgcaccattgattgttgtattggagtaacgtacagagaagtctaaagcaacacgtttattgggcttgtgatttacttttaaacttaagttatcacgcttaaaatcagaatcttgcatgattgctttatcatccatatgcgcatagctgaaagcgaactttgttttgtcacttcctccattgatgcttaaattgtgattgaaagtatgtccggtacgcccaaatacctgatcttgccaattgttaccttcaatattttcataaagatctatatcctgatagttaccaaaaactttggtataatcatctggattgatcgtatcatgtttaccactattcaacatagccaattcatattgccattttgcatagtctccggatgaaagcgtgtttaactgtttggccatctttttccaagagtagtaagcgttataattcacagaaatcttaccttccttaccacttttggttgtaacaaggatgactccattagcaccacgagaaccatagatagcagtagaagatgcatctttcagaactgtcatatcttcaatatctgaagcgggaatatcagaaatagattctacggggaagccgtctacaataaataaaggagtgttatctcccgtaatagaaccgccaccgcgtacacgaatcttcatttctgcatcaggcgaaccttctgttgtggtaatttgtacacctgccatcttacctgttagtgcttccgttgcggatgcaacaggtactactgtcaatgcttcagcattaactgtggctactgatcctgtaatgtctttacgcttggcagtaccataaccgataactacaacttcatccaacgcttttgcatcatctgatagtgtaacatcaatcttgctttttcctttgattgcgatttcctgcgttttcataccaatatatgaaataactacagtggcgttggcaggaacttttagagagaaatttccatccaggtcagtgattgtaccattggtagtattccctttttctacaatggaagcaccgataatcggttctccggttgtgtctttcacattaccatttaaggtaatagtctgcgctgatacgctgagcgataatgctgcgaaaatcattagcagcaaagtgcgcatgtttttcattcctttaggcatcttttgttcttttatattagattattaatattcgagtgtgtccactcttagagttctcactggtgcaaaattatgtttttggggcttgtgggatgtgtaatatttgtttttacgatagtattttttgtttttccggcataaaatgaataaagacgaggatttatggggaaatgtactctcgtcttaatcttttataactgtttattcgggcttttagttttattttttagaatccgcaggatacagatgattcactagctcattcagatatacctccagattggtgtattctttactcaaactatattgtgcgccgtcgcttggatcattcggattcagattgtgctttttctcccattcgtccggtatgccatctccgtcggagtcggttggggtcggttcggatttatattcgggccagcctcctacatctatcggttggtcaaccattccgttggtgcttccatgagacccttcataagtgtaattccctttgcgggtttcttctacgattcgttggtctacggcatcgcggcggtgagaagctccggcaaattgcagtacatctttataggctttctttgccggttgcaatgaagtatgctctgctatatcaaatgcttttttggataataaattcttttccggtgcgaagtcgttcttgacgatcagaccaaatgtattatccatattgactttataaagagcttctttctgcttctcagtcaggctgggacaggtggcgtccataaagtttcctttgaagtggaagattccatgtacccctgcctcattttgatttttgccgtcgtctgcataagcggtgaacaggcgtcggtatgaacctttggtagcactatagggccccggcttatagtaattattgagaaagttgtacgaaccgccttcaccggcataagccccgtcactaccataattgtagattacattattgaataattccaccttttcttcttccggtttgccggtataacggctgccgcagagtcgtggagtacgattggtgtgatgtgccagcagattatgatggaaggatgctttttgtccaccccagatgccaccatagccatgtgctcctttctcatgaatagagttggcgaggctttcgctgatgatacaccattgaagggtgaattgactgttatcatagaaagtggcacattcatccgtacaccagctcagagagcaatggtctatgattatgttactgtttcctttggtaccgttcattgcatcgtcacctttttgcttgatgtccgctcccatacgtgaacggataaagcggacaatcacattgtctgcttgaatggaaaaggtgtagttcttcagacagatgccatctccgggagctgtttgacctgcgattgtcacatctccattgctgagttttaaaggtttctgcaattcaatgatgccgctgactgcgaaaacgatcgtgcgggggccctttttgttgatagcccaacggaaagttccttccgagccgtcatctgccagtgaagttacagtgtatactgttccaccggcacctcctgttgtatatttccctgcaccgtcggcgcctgggaaagccggaacttttgaacggtcgggagtagcattctctttgtacgaattgtcagtatttgtattcccttggatagaagggagcataaataaggcacatagccctaccaggatttttttgttcatagctacttagttattggttgggtataaggaatttaccaaactattcagatagacttcgaggttggtatattccttgcttaagttatatttgtttccgtcactgccgtcgttgggattcagcccgttggctgtttcccattcgtccggtatcccgtctttgtcactatcctgctgtgtagtggtagtggatgcgtattcactccatccttccacatcagcttgtgtatcgatcagtccgttcgttcctccgtttgagcctgtgtatgtgaaagtgccttcctgggtttcttttacaatacgtttatcaatcttgtcacgcagattggaagcaccagcgtatagtaatacagactgataggcatcttgtgcagactgaacgaacgaataatcatctaagataggaaaacgtaaagatacaagcaaatcttttgttgaaacttcgttgttttttacgcaaaaagcggttgaggaggtattatctgcatttgcattggccaattctgtcttttgtgaattagataacttctcatgtgtttcgaaataattcccgtttacatagaattttccatatactccttttgcctgttgattcttgccatcatccagataagcggtgaaaatacggcaatgtactttcgctacggcattaacaggtcccggtttataatagttattcatgatattataagaacctccctctcccgcataggccccttcgccagtccaattatagattacattattgcataaatcgactttttccatatcctctctgttggagtagcgacttccgcagaggcggggcgtgcggttactatggtgagccagcagattatggtggaaggttgcagggctgcctccccatattccgccatatccatgtcctcctttgttatgaagagaatttgtcagactctcgctgatgatacaccattgcatggtaaagtcggtatttccataaaatgaagcacattcgtccgtactccagctcattgagcaatggtcgataataatattccttttgccgggataagaatcttgatacccattcatcgaatcatcttccgtcttacattcatcccccatgcgtgaacggataaatcggataatgacattgtttgcgttgacacgtaaagtgtaatttttcaggcaaataccggggtggggagctgtttgacctgcgatggttatatcatcattctttatttgcagctgtttgcttaaagggatgactccaccaacagcgaatacaatcgtccttttgcccgacttctctatcgcccaacggagagtaccttctgaaccgtcatctttgagagaagttactgtatatactgttcctccggctccaccactagttagttttccggctccttcggcaccgggaaaagctgcgactgtcgaacggtcgggagtcggatactccggcagctgatcctctcccgaatcatccggatcagtagaatctcccggctgttctgttggaggatttgtgtcctgttcgagattttcttccgaacaggctgtgaatgatatgaagacagatgcaagaaaagctcctaaaaaagttttattcatggcattagttctttaaaatattggttgtactcacgtattgtgttaattatatggttgcaaatgtatagggaagaaaagacgtcggtgtgcaatatttgtttttcacattgtattttttgttattagattcaattagagcataatttattgcgctttactctgtcccattcaccgatttttatccggtattcatcggtttactgaccggaaatcatctgaaaagcctgtaagagcacaaagaaatgatgtatctttgaaccatcaatcattaatcatagaaacgatggaacagaaatctaaattctcatctcctacaggtttttcaggaaaacttttggtagcttcattatttatcctttcagggattttgttgttcgcccgcaatatgggttggattactgctgaattatttagtataatagtatcatggtattctctttttattataatgggaatttattcgatgatacgccgtcattttgttggtggaattatccttgtattggtaggtgtttattttttgctaggaagtctttcatggctgcctgagaattctcaggcaatggtctggcccttagctttgatcatagccggagttttatttctttttaaatccggacacagaggaccatggaatgataaacagcgtatgtttcgtgaccatagagaatggatgaaacatggacattatggtcatgcgggcatgaactttgccaacaatcagcagcaaagtgaatcggaagatggctttctgcgttctgataacacttttggagctgcacgtcatgttgtgcttgatgaactttttaaaggagcagtcgtccgtacctcttgtggaggaacaacgattgacctgcgccatactcatatcgcaccgggagaaacatacatcgatttggattgcagttggggaggcatcgaaatatatgtcccttctgactggaaagtagtatttaagtgcaatgctttctttggcggttgtgatgacaaacgctggcaaaacgggaatattaacaaggaaagtgtattagtcattcggggaaggctttcttttggcggactggaagttaaagactaacgtatgaaaacacatccgattatagattatccttatcgttgggtgccggtattggtggtagcgctggttctggtgttagctcaggtaatgataatgagtgtatacacaggtgcggactatgtgcctgctgtcatagacggaatagcgacaatcggttggttgatggcattaggttatttggtctggtttgttgtcggagtagtctctatctttcagacggaagtcattactctggtggcaggaatactgatctggatagccggcagctttatggtttacgatattgtaacaaggatagccggtataccctatatcacttttgcgtctaccatcccttttcgtctgttgtttggcattccgacctgggttgccattcttctttggtatcgtttgattgtcgctaaagaagatgcactgaatcaggaactggaaaaagaattgataatgcatcaaccggttagcctgccggaagaaccgcagatagagcagatcgaccgtatcacagtgaaagacggttcgaaaattcatttgattaaaacggatgaattaatctacatacaagcatgcggagactacgttatgctgattactccttcgggggaatatctgaaggaacagacgatgaagtattttgagactcatttgccttccgatacctttgttcgtgtccatcgctcaacgattgtcaatgtcactcaaatctcccgtgtagaattgtttgggaaggaaacgtaccagctattattgaaaaatggggttaaacttcgggtaagcctttcgggttacaggttattaaaagaacgtttaggactataagaaatagctatttgatcaacggatgattcattttcgttcgttatcagctaaaatttgagtgtccatcaggcggctagcatttagagtaatgaatgctagtcgcctgatggacacttttattctaatccaagcaaatactgaaaatgactagtcgaaattactatgtaaagtaaaatatggaatttttggtattttaatcccaaaatctcgtatctgatattttagtgataaaatagtgcacctaaacgctcaaaaagtcccctcgctttatgttttatataacttcttttgcacatatgaaacaaaaaataagaactataaaccaggaatattaatgaataaacataagataattcctgtttcaattttccccatgttttcaacgattgatttgcatgtaatataagtattgattagatagtaatatgtattaactttaaattgaaatgaatgaaaaattgtgcatttattaagaaatggaaatcctggtatcaacgctttcctgtgcttattagaacgacgtttgtggtaactccagtctttttcagacgttacctggtacaatatcctttttgtgcttgtcttttatttttaggggcgtgtaccgatgtcaaagggtttactaatatggagttaggtccctatgcgaaaggaccggaggtattaaaggctttccctacagctgaaggcttcggtaaaaatgctacgggaggtcgtggaggaaaagtcgttatagtgaccaataccaacgatgacggagagggctcttttagatgggcattgcagcaatgctcacaaaacgaagcaactactgttgtttttgcagtttcgggcaaaatagaattaaagtcggaaatccgttgcaaagctaagaacttcacgctggctggacaaacagctcccggtgatggtgtttgtatcataaagaatgaaataaattttggtggttcggagaactttattattcggcatatgcgttttcgtgtcggtgaaaaagatgcgagtggaaaggaacataatgctgcctgtctgcgggtggaaaatgcgaataactttataattgaccactgttccttcagctgggctagtgaagagaataccgattttattgatactcatttttctacagtgcaatggtgcatttccagcgaggggctttattattcggtcaataaaaaaggtgcacgtgcttatggtggtgcgtggggaggaacttcatctacttatcaccataatctgtttgctcattgtaatagccggacaccattgatgaatggcgcacgggggaaggatcccggacaggatatcgttgtttatatggaatatattaataatgtgaattataattggggcagccaaatggctacttatggaggtatggacgagtctcaggatccggaacatcatggatggtcatgtaactttgtgaataattattataaaccggggcccgctacgacagcccgggtaaaagaactgaaattcttccggcaatcaagtgcccgtgaacccaataaagcacctttacgtgccgtttcaaagtggtactttcatggcaatgtaatggagggtaattctcaactgacttccgacaattgggaaggtgtatatacggatggtaattatccttattctatcgatgagatgaaagcttcttctttcattattccttcagggaaagagaattatgaacaatattggttcgactgggaatcatacactttatctgaccaatatgaatctgcggagaaagcttatcaatctgtgttggctgataaaagtggtgccggcgcatttccccgtgataaagtagatgcgcgtattgtaaaagaagtgaagagcggactttgtacttatacaggagccggagacgccaatagtggtgctatcccgggcataataaatagcccggatgaggctgaaggtctggatggactgacgtataaaaccagcggaaccattacggatgcggatcaggatggcatggatgatgcctgggagaaaaaggttggtttggaccctgctaatccggaagaccgtaacaggacaacagaggttggttatacagctttggaagtatatcttaatagtctggtaggtgaaagtatttcctacaactttaagaagtgaaatcagtgttaatattaaaatagaatgctatgaatttattgaaattaatgacagtagggtgcctgttaagttgtttttcaggactaatgacaagctgttcggacgatgatgatgccggctcaaaagtattgttacgaccggttactgctatggagatagtgcaaaacaaggcatatcttagttggaaaagcgtagaaggagcgaccgaatatatcgtcgaggtgtataaggtggtggataaaggggaagaactttataagacggagaccgtgccgggtgaccgttcttcctgtgtgatagatttagactgggaagaaaactacaagtttaaggtgaaatgtgaaggtaacggaaggctgtccggttattgggaaacagaggtgacgggtattctttaccgtcctttgtcgatagagttaggagaagctcgtactatagatacacaggctcttatttcgtggacgcctaatgatactgttgtgattacagctctgactgctgttccgatgggactggagacagttaattctcaagatataaaggtttataacgtttcttccgaagaatatctgggcggctccaaaatcatagatgatttaactccggagacttcttatcgtgttagtttatattcgggtgatgaacagagttcggatacttatcaggcacgcatagaagtaaagacagctgtaaccgaaaatctggatgaagattatgggacggcaaaccggatagatttgcgtaacgaagcatttgatcctgattattttaataaacttgactggaactctctggcagaaggtacaacctttgtgcttccggcaggtaagacgtacgtgttgaatagtggagaaactgttattgagtttgcacattccgttcattttgttactccgcaaacgttggaagattatccgacatttagttttgataacgctttccgtatagtagaaggcggagttgtagacaaggttacttttaaacgcatcaatcttagggcttccaaatcattaagtgaggttgctgataacagtttgagtggtaaacaagtgatttgtccggagtccgatgtttttctgattaacacgattgatttcactaattgctatattgagaatttccgttctattgtccgttcaaaaaaggctacaggaaatgtaggagctattgctttcaaagaatgtaccattaacgcaatcggtaatcagggtatagtttcgactgatggcaaaaatggaaattacatcaatgatgtctcttttgatgagtgtactatcactaatatttgcggtattgcagatttgcggaatagtagcagcggaaagagtatttcgattacaaatactacattctgttatgcgccgatggaaaactccttcttattccgggtagatccgagtattgctgtcaagattgaaaattgtgtatttggcggttccatgaaaatagacggaaaacttccgaaatttaatgaactggggtccggaggacaggatgattataccggcgtatatcctttcagttcggttaatagttttcaggctaatgatcgtacctcaagcaaaggaagcctcggactgagtgattctaaaatgtcaactgccactctgttcactgctccggggactaacaattttaaattgaacgagttattcacaggttgttccagcgtaggtgcttcaaaatggagacgatgaaccgcgcattaaataatatatataatatgaataaacacattgtatttatgaagttcaagagatcttcattcattaaaaaggtaggcgtgctattgtgtttcgtagcatttgcgctgtcagccaatgcacagacccgaaaggttacaggacagatagtggacgaaagtggccagccgattatcggagctactatacggttacaggatgctacgacaggtactattactgatattgacggtcacttttcgctgaatgtgccggatgggaaaaaggtggtaatatcttatatcggatatctgaaacaagtaatcctgccgaaaggcgatactttgaaagtcattcttcaggaagataaccagaaacttgatgaagtagtcgtagtaggttacggtagtatgaaacagaaaaacattaccggttccgtatcgactatttctgctgaagaactggaagatcttccggtatccaatctttcggaagccttgcagggaatggtgaatggcttgaatgtacagttaggctccagccgtccgggtacgaatgccaatgaggtttatatccgtcagaaccggactttcaccggaatatccaaggatggcggtaattccacccctttgattattattgatgatgtcattcagttaggaacgaatggacagccgagtatggagcagtttaatatgctggacccttcggaagtagaaagtataactgtgttacgtgatgccagcgcagcgatttacggttctcgtgctgccaatggtgcaattcttgtaaagaccaaaagagggaaaaaaggagtacctgttatttcctattcaggtaaatttgccgtgaatgatgccgttagtcattccaaggtgctgaaaggttctgcttatggacgtttctataatgctttggcgataggttccaataaagcgagtggttatgatgacctcgacgtgttgtatagtgatatggaattggctgagatggataacctgaattatgattggctggataaagcaggttggaaatcggctttccaacagacacatacactgaatgttaccggtggaagtgaacgtgctacatattatgccggagctacttattttgaccagggagctaatttgggtgatcaaagctataagcgttatacttaccgtgccggtgttgatgtgcgtttgacgaatgatattaaattatcagccacggttgccggtaatgagggtaaatccgatcagatctatacaaaaggggctcgctttaaactgtacgggatgagtggaagtacggaaaaatcagactatagtgctttgcatcatatgcccaaccatatgccttggagtgtgactttaccggatgagaacgggcaagatcaggaatattggttgggacctatagagaatacatatagtagtccgagttttaatagagattatgtcacttcctggaattattttgcgttgaataatagtggttcgttcagtaagaacagaagcaacagctggaatgctgatatctcattgacctacgaagttccttttgtgaaaggtttgtcgctccgtgccacttattcgtcttcgcactcaagtgaagcaaccgagcaggctagtttcccttatgaactggcgtatgtaggcggcagaatgcctgccgatcagcatttggtttataccatcccgagcagttcctttaaaacggctatctttgataaaaacagtacattatcatttaaagataaacaggcggaaagacgtcagatgaacttttacgtaaactatgaccgtacgtttggccaacatagcatttcggctatggcttccatcgagcgttatgaatcattctatgattctcgtgatattgaatatgccgatctggctcatgacatttctgatacttatctgggagtcggtggtccctccatcgtcgggccggacggcaagtcagctctggcttccgacaatacagtgacgcttaaaggtgaatcgggctcgctttcttacttgggacgtgtggcatattcttatgctgaccgctatatgctgcagtttattttccgttcggacgcttcgactaagtttgctccggagaattactggggattctttcccggtatctctgcaggatggatcacgtctgaagaatcatggttcaaacgctcgcttccttggtttgaatttttgaaggtacgtgcatcctggggacgtacgggacgtgacaacatcaaaatgtggaaatggaaagaacagtacaagatggacttgaaaggaatgcagttcggtgccgaaagcggaaaaccaggtaccagtctgatcccgcagtcatctccgaaccgtaatgtgaaatgggatgtttccgacaagtttaatcttggttttgatactcgtttttttgatggtcgtttaagtgcggtattcgatttctactatgatatcaatgataacatcttgaatcagtttatggctagccaaccgggaattcccgtgtatgccggtggttcgtatgctgaagaaaattttggccgtgttgatacatatggcggcgagttgtctttgacatggcgtgacaaggtaggacaggtgaactataatatcggtatggatttcggtctgaacggtagtagagtgaaagagtgggtgccgggtttgcgctataacaaatatccgtccagctcaagctgggaggaaggaatgtctacttatctgccggtatggggattcaaggtatggaaaggaacctcgaatggtgacggaattttgcgtacgcaggatgatattaacaggtattggtcttatctggaatcatatactcccgaaggcggacaaactaaatatctggataagacaagtaaagacgatttgcgtccgggtatgctggcttaccaggatttagggggcgaaatggtcaatggagttcaacaaggtcccaacggacagattgtattggaacaggattatggaaagttatgtgaaaagaataagacttataatgtatcgacaagactgggtgccagctggaaaggacttgctatcagtgccaatatcgctacttcatggggtggagtacgctttatagaccgtgcttctatgggtggtaataagagtacaatgatatgggcgccggattctttctggggagatatgtttgacgaaatgtacaatccgaatggtaaataccctaacttgggaacagaatctctgatttccagttcggctatcgccaactctgatttctggatgattagtaccttccgttgttacatacgtaatctgtctgtcagctatacacttcctaaaaagtggattgctccgttgaaaatgtcggctgtccgtctgaatctgaccggtaataatttgtgggatttgtacaatccgtaccctaaccattaccgtaatatgtatgatgcttcttctacagattatcctactttaagaacttggtcattaggtgttaatgttacattttaataattgtgtcaacgatgaaaaagaaaaactttttatatacaggaactttagccctcggtatgtttatgtccggttgcagtgattcatttttggatatgaataattacggagcttatgatgattttaattctgaaacgaaaatcacctggtatctggccggattatatcagactagttttgaaaactatacatctccgacgtctcagtatttgggattgtatacttcttatgcgcaggattttaacgaattcacggatgagatgtggggaatcacgtctaccagccggattgacccgagtacgcaatattcgaccattgatgatataaaaacacagacagatgcatccagcggtaaaagttacgaccccttgtttgccggttatttcggcaaggcactaggttcaagtgttacaaacaatgcttatacgcgtatacgtaactgcaatatcctgcttcgtgacattgatgcttcctcggtttcgcaggataccaaagataaggcaaaagggcaggccctctttctacgtgccatgcagttgtttgatttggttcgtatgtatggttgcgtacctattgtgacaacagtgctgaatgctgaggtgaccgatgcaggactgccaagatcctctgtgacccaatgtgtggaacagattgtgaaagacttgaccgatgcggccgctttgctgccggatgaatggggaacaaacgattacggacgtctcacacgtggcggagcattggcatacaagagccgtgtgttattattctatgccagccccatctttaataagaattggaatgatccgggcaaccttcgttggcaaaaagccctggaagctactcagaacgctatttccggtattactgccagtggattggacggtgtgacggatgctgcaagctggagtaaaatattggcggatgacgataatgaacattctaacagagaaacattagttgtccgactattggctaaggaaagcaactcgtcattaggttacaagaataatcgctgggagaagaatatccgtttgagttctcaaggaggaagcggtggaaaaggtgctcctattgagttgatcgatgtattccctatggctgacggtacacttcccgatgccgctcatcaggttaccgaaggtagtttgcgctttatggaaaaccgtgatccgcgtttctaccagacatttgcctttaatggtttgaagtggggacataaagatgtcaccaatgatacggtctgggcttatcgttggcgaacttcggagtcaactaccagcggctttgcctatagtgaaggagtaaatataaccagtccggtattcgtacgtaagatgagtggactcaatactgcttctgccaacaactacgaagcttcgggagtgcatatctatgatttccgttatgcggaattgcaattgaatcttgccgagtgttatgcggcaaccaatcagattgatttatgtaaacaggcaatcgggaaattgcgtgcgcgggttgggattccttccactaataattacggtttggatacttatgtgtttgaccgggcatcggcgttggctgcctgtttgcgtgaacgtcaggtcgaactggcatatgaaggcaaaagatattgggatatttggcgttggatgctttatgatggaggacggggagaagctatgcagttgagtaccactaatacctgttcattcctgggagtaactccgttgaccgaaagatatcgtacagctaaatatgtggatgtaaaagatggatatactccaggcagtaaagatgtgttgtcggaactgcgtaagaatatatttgcagaccctgaatctgccgatttccagaagcaacttaaagaagtggctgatttttgggagtctaatttccagtacggggagcccaatgtgcaacctgataagaacaacagcaatgaatggattaagatcggatggcgatctaattattatataatgggtctgtcaaaagatattttggacaataactcctggctcggacagaccaaaggctggacagaccaaaatggtgctgccggaactatagattggcaagatgatgaaactctgaccatagattaaaactgttttcaggattagattaagggccatagtaaggaagaattttataatacttttctactatggcttttttatgaattattttccggagatatactttgtttgagtacaattttaatagacgaacaggtaaatgactattttttactcctaatctgtcaataattgaacttagggggagtagacttccattacttttgcttgtgaaatgggaaaaacatatcaatgaagatatggatatttctgtaagtagttatcaataggaacccgataaaataaattaaaaagagatgaatggaattttgaaaaaggatttgagagttgtgctgacaggtgttatgatatttatatcatatcaggtttattcaaatccggaaagtggaacaaaagaacagggagacgtatacaggaatcttccgttttcaatgcctgaagtgagccaaccttcctttcccgattatgaggttaatatccgtgatttcggcgcactcagcgatggtgtgaccttgaacacagaggcgataaacaatgcaatcaaggcggtaagttccaaaggaggggggaaagttatcatacccgaaggattatggttgacggggcccgtcgtacttttgagtaacgttaatctatatgtcgagaagaatgctctcattgtatttagcagcgatacatctctatatcccattatcgacacttctttcgaagggctggaaactaagcgctgccaatcgccgatttcggcaatgaatgctgaaaatatagccatcaccggcaatggtgttttcgatggggcaggagatagatggcgtccggtcaagaaagacaagatgacggaacggcaatggaaaaatctggtgagttcgggtggtaaagtggatgagaacggaaaagtatggtatcctgatgcgggtgctttgaaagcttctgtacttatgaccggacaaaataacgggcagaaagaaataaccgatgaagagtggacttacatgaaaagctggttgcgccctgtcatgctgagtatagtaaagagcaaacggattctgctggaaggggtgactttcaagaactcaccgggctggtgtatccatcctttgtcctgcgaatctttgactttgaacgatgtgaaggtgttcaatccctggtattcgcaaaatggcgatgcgctggatgtggagtcgtgtaaaaacgtactggtcactaattgtttttttgatgcgggggatgatgctatctgtctgaaatcgggtaaagatgaggatggacgcaggcggggagaaccttgtgagaatgtgattattaagaataatacggttttgcatgggcatggcggatttgtaatcggcagtgaaatgtccggtggtgtccggaatgtatacgtatcgggctgttctttcgtgggcacagatgtcggtttgcggtttaagagtacccgcggacgtggtggcgtagtggagaacattttcatagataatattaacatgattgatatttccaatgatgctctgacgatggatttgtattatgctgtcaatgactttccggaaactccgataccggatgtgaatgaggaaactcctgttttcaggaacatttatatttcaaatgttctttgcagaggtgcggaacgggcagtatatttcaacgggctgccggaaatgcctcttaagaatatctttatcaaaaacatgactgtaactaatgccaagaaaggtattgtaatcaatcaggcttctcaggtgaatatggagaatatcaaagtggaggatcctgaggctccgggcatacagataaaaaatgctacaggcattattattaacgggaaagaatataaaaaggattccggaaaaatgctgctttccggaaatcagcggaattaacagatacggaactgttgctaacttattggaacatagggataaataagtatcctgctagccaaaatcttttatgtctttagtcgtttttctttcgtagcacctaggtgagacgaatgtattacctaggtgcttcagttatctgacctgggtgctacaattgtctgacctaggtgctacgaaagaaaatagccggttatggtgattaatgaatgcgtacggtcggcttctttttttatttattcttctctttatattcggaaggcgtgatacctactaccttcttgaagcatttactgaaatacttcgggtcattgaaaccggtcatataggctacctgtgagaaattatattccccgctgtctattagctgtgctgcacgtttgatgcgtacttcacgtatgaagtctacaggagtcagtccgatgatggacttcagtttccgatagaagatggtgcggctgagcatcagatgctctgcaaattcgtcgatggtcagttcggcattatccatctgttcttctatgaactccattaccttttgcatgaattgctcgtcgtagggagtaatctgcggttgcgatggggtaagagcttctgcgacagctatttcttttccttccgtcagtttggccatatagatttcctgcaaggatttgcgttggcggagcagtgaagcgatacgtgttttcagatatgtggcgctgaaaggttttgtgatatagtcatctataccttgctccagtccggcaatccggtcatccaaagaggcttttgccgataatacaataatgggaatgtggcagatgttattgttttctttgatttgccgaatcatctccagaccgtccataaccggcatcattacgtcactgatgataagatcggggatattatcaactgcgtgttgcaatccttcttttccgttcgaagcggtgataacagtataattctcagataagatgttttttaagaaagctttcagttcctcattgtcctcaaccaccaatatagtaagcgtatccggagccgtattattctccatatcttctttgtcttccgcttctgctcttttttcagtctggaggctgctgtccggatgagtagtcggactttgactgtcattcagaataaattccacctgactgtcttgttcgaagacttctttttgaagaggcagagttactatgaaacggcttcctgcttccggctcgctcgttactttgattgtaccgtgatgcatatcgaccatttcctttaccaatgacagaccgatgccggaagacggttggagcatattctgctgtgccagcgtttcgaagcgctggaacaaagtacgcagtttagtcggttcaattccgatgccttcatccaccacagagattgtcactttatctgtttgttttgtcacttctattgtaatcgccttctcagccggtgtatatttgaatgcgttggatatcagattaaagaatatcttttcaaacttatcgcggtctatccatgcatatattgatttaagttcgcttgccaaccggaaattaatcttcttttcttctgcaatcaagcggaagttgatcattactttttcaagaagtggaatcaggtctgtcttctccaccagcactttcatcttctgattctgtatcttacggaagtccagaatctgattcatgagacgtagcatacgttcggcattcttttgtaccacagtcaagtgctcacgggctgtggcggataagtcttcattttccagaacttcattgaccggactgctgatcagagtcagcggtgtccggagttcatgagatatgtcagtaaagaaacggagcttgatattggatagttgttgctcgatatccacttggtggcgcaaccgataaatataaaaaagtacatatacgatactgcccgtaaagagaacgaagagaataacgtagagcagccatgcccagcccgtctcccagaaagtgggcagtacgttgatggataaagtgcggatattgtccatccatactccgtcgctgttggtggatttgatttgcagtttatatttgccgttcggcaagttgatgtagctggcagaacggttcttgtccccgtcatgccactcttcttccagtcctttcagtcggtatgcgtaacggatttctttggaatcgacataatcgagtgccgcaaactggaaagtaacattacgctgagagggggtgaggcgtaattctttcagatcgtcaatggcgatgacagaagattgtccctgcactttcaaaccggtaaagacaatgggagggatataggaacttttctgcatctctttggaagaaatctcaatgaatcccttgtctgtaccgaatacgatttgattgcgagcgttgatcaccggtgccgcttctgagaagctaaattcctggtgcagagagttaagcccgtaattctcgaaagtctttctttgagcgtcgaatttagaaatggcattttccgaaagaatccataagttgccttgttggtcttcctgcatggcttgtaccaagtccgaagccagtccgtcatccgttgtatatgtcttgaactcaatcttgttgctgagcaggttcttggatacgatttggctgatgcctcccgtaaagctggctatataggttcgtttttgcttgtcggtgtatgtatgcatcacatcatttccgctcaggctggtacttattcctgactcgcaacaattacgataaaacttgatttcttccggtctctcaaattgattggagaaagtcagtaatccgttggtggttcctattaacagcacaccgcccggcgcttcggatatgtggcggactttcgaagcgtagccggttgggtaattcttcaactcattatcgctgtgtataaattctgtcttaccgtccttattgtaggttagcaaattgattcctccgccatagcagcctatccagatacgtttatggctatcttgaaaaatggaatatacactgttgccactcaagctgtatggcatattcggttggtgagtgaattgttgtacggaataggaatccggcgactttttctttaacagataaatgccgttttcctttgttcctatccagatattgccttcatggtcttcaagaaagcaatatacgcttgtaaaactctgtttatctttgcttatttttccttgtggcgtcagatagccttccaactgtccgtccggttggtacactctgatcatctgtgccttcgaagaaacccacagcctcttttcattgtcgcataaaaaagcgcgggtctcgaatccattgtcaatatgcaccagattataggtatgtggaaagaaggacaatttgtaaatgccacgtgtactggtcagccagcagttgccttgattgtccagtgtgtaaaagcggacgagcggactgaaaacagacttcggattgttgctgtccttcagcatgggtttcagttctttgttttcacggtcataataagacagattcccttccggggggagaacccataacgtgtgttgccggtcttcaaagatcacattcttatttttccgttcatatctgatcacttcgttggccggtgtgaacaaatgctgcatttccttggtggatggattataacggatcactcctgtcgtttgggggaatatccatagttccttgtaatggtcttgataaactgactgtacgacgttggaaggttgcgttgatgtgcgtatatcaatcaactggaattctttttcttttatcttataaataatcagtccgttatctgtagccagcaaaagtgtattggagtcaaacttcttgacttcgttaatcatcgaaacatgataaggaatctctatgaatttgaattgtctggtcttaaagttgtaagaggccaatttgtccgattgggaaaccagataaataattccatccgcttctttaatatattggaacgggaaatcgctgtctacctgcttctttcctatgatagaaattcctttgttggtcagtatccattcatctccttcggaatcttcgaaaacggtatatatcttgtctcccttcaagttttgtttgaaggaactgtacagagtgattcctttcccctgtttgcaaagttggtcatctatgcggatggcggcacattcgttttgaaaggtgatccatgagattcctttggaaagggtataaatatggtcggcataattattcgttatcatcgtttctgctaccgatcccaatacatcgataaacttctctgtctgattgtcgaacatatacacccgtccgtcgtaggcttggcaccagatatccccatatttcgtttccgctatctgactgatccggttggtattcagaatatagccgtctttgtaagatgtcttatagtttttgaatgtatatccgtcgaatttattcagcccgttccaggtgccgaaccataggaatccttttttgtcttgtatgatcgtctgtactattccttgtgacattccgtcattgacggaataatgcttgatgtgataggtaggctgggccactaatatgcaaaggttaaaaagagaaataagaaggagccatgtgcgtttcataatatcggtgttttttgtcagaacaaaaataagtaaaaggatggaaaacaagaagcccggacgctatattgaacggataatacgaaagtttgcctattttttcctccctttcgctgtcttgtctgcctgcttatgctaaaaatcctctttatattctgtttttagaacataaagaggatagtttattgacgagagtcgcatggggtatggtgagatgaaatcataattggggaataattgcacaagactttcacaagtatcctcccgtcaatgcttaaaatcacacaaaactaactaaatagtttctgctttcgcaataaatattaatttatcttatgcactttatgttttttttaatatattgaagatattttggggcatctttccgtaactcgctgttttttcttatgtttgccacacaaataacaaatgaattaaatagatatgtcttatcaaatacaatataatgatttcccaacctttctgcgaaaacattttccttacaaagtgcagaaaatatcattaaatgccggttttacttgtcctaatcgggatgggacgaagggatggggggggtgtacatattgcaataaccagactttcaacccggactattgccggacggaaaagtcgattgctacccaactggaggaggggaaatgtttctttgcccataaatatccggagatgaaatatctggcgtatttccaggcatataccaatacttatgcagaactggaaggactgaaacgtaaatatgaagaggcgttgcaggtagacggggtagtaggattggtgatcggtacgcgtccggattgtatgccggaagaactgcttcagtatctggaagaactgaaccgccatacattcctgatggtggaatatggcattgagagtgccagtgatgagacattgcggcgtatcaatcgcggacatacgtatgcggatacggtagaggctgttcagcgtaccgccgcctgtggcatactgacgggcgggcacgtcatcctcggtcttccgggagagacacatgatacaatggtagagcaggcaggaatcctttccgcgcttcctttgtccacactcaaaattcatcagttacagttgattcgtggtactcgcatggcgcatgaatacgaagagaatccggaaggttttcatctgtttacggaagtggacgaatatattgacctggtgattgactatgtagagcatctccgcccggatctggtattggaacgttttgtttcgcagtctcccaaagaattgctgattgctccggactggggactgaagaattatgaatttgtaactcgtttgcaaaaaagaatgaaagaaaggggagcttatcaaggtaagaagtacagggattcagaaaaaagagttatttttgcggaagataacttcaccacagaataaatctctgtcctcagaggatcatagctggtgagcagaaattaattaaagttgaagaatggaacagaaaacaagaattaaaggaaatgtccactatgtgggagtaaatgaccgtaataaacaccgttttgaggcgttatggccgttgccctatggagtttcgtataactcttatttgattgatgatgaaatggtggcgttggtggatactgtagatatctgttattttgaagtctacttgcgcaagatcaagcaagtaatcggcgaacgtcctattaactatttgattataaatcacatggagccggatcattcgggctccatccgattgattaaacaacactatccggatattattattgtcggcaataagcaaaccttcggtatgattgaaggattctacggtgttaccggcgagcaatatctggtgaaagacggagacttccttgcattaggcaagcatatgcttcgtttctatatgactccgatggtgcactggcccgaaacgatgatgacatttgatgaaacggacggaatccttttctcaggtgacggattcggatgctttggcactgtagacggaggatttctggatacccgtatcaatgtagataagtactggggtgaaatggtgcgttactactccaatatcgttggcaaatacggtagtccggtacagaaagccctgcaaaaattgggaggactgcctatcactaccatttgctctacacacggaccggtatggacagagaatatttccagggtgatcggtatctatgaccgtctgagccgttatgatgcggacgaaggtgtggttatcgtatatggcagtatgtatggaaatacggaacagatggcggaagctattgctgcggaactctcagcacagggaatcaggaatattgtgatgcacaatgtgacgaagagtcatccttcttatatccttgcagatattttccgttataaaggattgattgtcggttctccgacatacagtaatcagatattcccggaagtggaatcgttattgtctaagattctggttcgcgaactcaaaggacgttatttgggatacttcggttccttcacctgggcaggagctgctgtgaagcgtatggctgaatttgcggaaaagagtaagttcgagctggtaggcgatccggtagagatgaaacaggcgatgcaggatattacctatacccagtgtgagaacctggcacgtgcgatggcggaccgcttgaaaaaagaccgctaaataaagaatgaacaattatttactaacctataaaacaatcgacttatgagacttattattcagccggactatcagtccgtatctcagtgggctgcacattacgttgccgcaaaaataaaagctgccaacccaactccggaaaaaccttttgtattgggctgtcctacgggatcttcacctctgggtatgtataaagctttgatcgatttaaataagaaaggaatcgtttctttccagaacgtcgtaacattcaatatggatgaatatgtaggcttgccgaaagaacatccggaaagctattactcttttatgtggaataacttcttcagccatatcgatatcaaaaaggaaaatacgaatatcctgaacggtaatgctcccgacctggatgcagaatgtgcacgctacgaggaaaagattaagtcttatggtggcatcgaccttttcatgggtggcattggtccagacggacacatcgcattcaacgaaccgggctcttcactgacttcccgtacccgtcagaaaacgctgactacggatacaatcattgcgaactcccgtttctttgacaacgatattaacaaagttccgaagacagctctgactgttggtgtaggcactgtgctttctgccaaagaagtgatgattatcgtaaatggtcacaataaggcccgcgcattgtatcatgcagtagaaggttctatcactcagatgtggactatcagtgctttgcagatgcacgaaaagggtattatcgtttgtgacgatgctgctacggaagagttgaaagtaggtacttaccgttacttcaaggatatcgaagcaggtcatctggacccggaatcattgatcaagtaagaaatattcaggcacggatttcacggattaacacgttttttagatatgtaatcttttaaaaccgtgaaatccgtgtagtccgtgcctgatttatatattctctaagttaatagtcttcgggattaaatcccttccagccagccttttccctgacggacaatttccggttcatcttctgtgcacttcactactgtagaaggttctatgcctcctattcctccgtcgattaccagatccacgatatcaccgaacttttcgtcaatcagttcgggatcggtcatatattccagatcttcatgctcatcgtatggcagtgtggtggtcataataggagcatccagtaagcgggcgatttcacagatgatattgttgtccggcatacggatacccacctcttttcggttacggaagattttgggcagccggttggtgccattcaggataaacgtgaacgggccggggagattatgcttcatgagcttgaactcattattacccactttggcatactcgctgatactgcttagatcgtagcagatgatagacaggttgtttttgcgcggatcaatatctttgatccggcaaatccgttcaatagcacgttctttcagcccgtggcatccgatggcgtacatcgtatccgtaggatagatgatcagtccgccgtcgttcaggatgtcggttacccgttgcaagtcctgcgggttattgtttttatcgtacagtttcagaagcatactctcttctccttttcttatttaagtttcttctttaagaaatcaagtgctttctctgtagctttttccgtcactttctgtttgatggaatctttgttggcagtcgtggcagaatccagtccgagcttttctcccagtttgctgattgcttcgtcggctacggattcaagtgcctgattggccatactctttgtatcgacactgactttcggggaagtgaatgaacctccgatcttcagatcgagcgtcattagcttggaaatgccggtggatgccggaagcttgatcttgccggagtagtcgatggtctggtcaagtcctgtgctaccggagagattcagattatagtcacccattttgatatcaaacggtttggtttccacccgtccgtctttgatggtgaaatccagtgtcatatctttcactttcatttctttcagactcggctggctgatggcgtcggctatctggtcgattgctttcacaccactcagactgaggtcgcgggtagacaagctgccgtctccttgcatcgtttccagtaccgggctcatggctgcgtccaggtcggtcagcacattgatgctgccggagaagtttcctttcagattctcaaagataggagccagttgctgaaccatatccagttctttgtatgcctgtgagaagctgatatccgacagtttgaatccggctttcatttccggtttcttcgcattggcggtagagtaatatccattcatcaccacgttgccgcccatagtacccatagaaagattcttcatatctacctttccgtctttgacaacaagtttaccgttcatgttgttgaatgtcatcttgtcaaacagcacctgtttcagattggcgtccatctggaagtcgatattgcgcggaacttctatcacgccggcaattgccgtggagtctgtggcagctgcttcggtagttgccacgctgtctgcggatgctgtcatgaaatcattcagattgaaataattggaatgaatgttcagcgttcctttcagtgtagtacctttcagagcgtagccgatatagttctcgaaacggctgtcggcagtaatatcgttcttaccgatattgaccgtcgtttcgctcagttgcagatatttcggggtgaaggtgaagagtgatttcttgatgtctacatccggcatatcctgcattttcagtttcatattggtcagaccgatggttccggaggctttcatgttgtcgtactgttctttctctatataagaaaggcgtcctgacatttgcatatcggcgttgatggttccgttcagttccatatctcccaaaggatatacctgtttgatcatacccaggtcgagcgtaccttttgcctcagctttgaaatcggggtcgctgaccggtgttttcacgtccgcagtcagactgaaaggatttcctgccagacggaagctaaacgggttgatttggatggtggtcaggtctatatttcctcccggattccggacgttggcattaatgttgatttgatcgactcctgcgggcaatgccggatagcggaacatagcgttcttgacttgcatatcgatgttgaatgcggggacagtatctccttgcagcgtacctttggctgatgcggcaagagtagcggttccgtctgttttcagactggagaattccgttgcgtaaatggcaggaatcaaagaaagtatttccttgaagcctacatcattggtgttgagtttgagatccatgtcgatagcgggatctttcagttccacccaaccgtcgatacctgcctgaatggcgttgaggcgaatggtattgtctttcagtgtatacttgttgttggcaagatcggcgtctacgtccatattggcggagatgttggcgtttgcaaggaaaggaatgccattcatcttgtaagtcagtgatttggtttccgcttccagtttcagcgtagtgcggtcactgcccaggtcaccggcacaaagggcgttgaaatcacggatgtcggcatacattttaccttgctggtcgtcataaatcaaattcatgttcttgatgacgaaacgttgcagcttgactttgaaaggagatgactcttcttccgtggcaggcgtttcctgcgtgtctgtcgtgtcgggcttcatgatatcccagttgacatgaccgtccggcaggacgatggcgtgcaggcgggtatcttctatgaatactttggaaatgtcataaccgctgtctccgaaaagggagaacagattgatggtggcagtcacctctccggcttgtacaagggtatcgtttgcgaattctcccgcgcctttcagccagaaatcttcgagagtaacagaagcctgcggaaagttgcggaacaggctaatgttgagtttcttgaaatcaaattgtgcattgagcatcttgttgccttctgtttttacaatacctgctatcttaccttggaaggcgaaaggaaggaggagcatcagaatgattattacccctacaacgatagctgcgattttcaaaccttttttcatttgcttttcttttaagagtttgacgtacatacgaaggcaaagttaataaaaagtttttgatgtaagatgatattcaataactttcacaatcagaagacttctgatacactaccaacttatttatgattttttctttctgagttcttcggcaattctccattgtatggcggcttccacttctttccccactcttaacagggcatctccgaagagctcgtgtgcgccggcatgctcgggtttcagacttgtagccttgtccaggtctgcaattgccccttctgtattatcgattttcagacgcagttttccacggttgtacacagctttaaagtttgcaggatgaaggctgacagcggtattgaaacagttttccgcatcaaaatactctttgctgttgaacaaggtgattccttttcgtatccaggcgtctatataattagggtcgaggctgagcgctttgtcataattggcaatggcggcacgggcgtcgtgggcttgggtgatacattcatttcccattaacagatattcatgggcatattgccgcagacgttcctgctgttcccgcatttgctctttgagctttttgttctgctcctgcaaggtattgataatccccagtttccggcggattaatcggcgaggaacaggtttctctatatcataacgggagtgaatggcacggaaaaattgttccagacattcctccatatcccctttgtcgaaagcacgtgcggcagcggcatactgaacatcggcctgcgcctgtttcagagccttgtcgatggcttgccggtcgttgaaccgtccggcaaagtttacgatttcgggacgcacaaagatatccgcccggttgatcggttttttgagctggatgccatccagtgaggtacaacggctgagtgctacatacgcctgtccgccggcaaatacacctcccgtgaagtcaatcactactctgctgaaagtcagcccctgactcttgtggacggtaatggcccaggccagccggatgggatattgggtgaagctgcctagtacttcctcttcaatctctttcgtcttttcgttgtagcgatagcggatgttacgccatgattcccgttttacatcgcattccttgccgtcatcggtgatgacgtatatcgtttcttcttcctcgtcgataccggcaatcactccgatggtaccgtttacccaccggcggtcgaaatcattcttgataaagatgatttgagcacccggtttcagaacgagttcctgtgaggtcggcagactgctttcggggaaatccccttcaatgcttccttcaaaggtgatcggttctcctgccagctcggccagtttcttctcattgatcgagtcaaccgtgtcccttcgggtggcaagcgtgatgtacatatcggcttccgattcttcgatatggcttccgtatcgggtgttcagcagttgcaggtcggctgctccggcggtgttggtacggatatggtcgagaacgctgacaaagacggaatcagtctgccggtatactttttggagttcgatggataccagatcgatctggctgaatactcttgccgaaaagaagtatggagtaggataggcacggttcagaatctcccgctcgtcattcttcacgacaggttccagctggaaaacatcgcctaccaataacaactgtttgccaccgaaaggttcccgtaagttatgcgaatatacacgtaagatgcggtcgatggcatcaatgaggtccgcccgtaccatagagatttcgtctatgatgaccagttcaatctgttccagtaatttccggtgcggtttggtgtacttgaagaactcgtgaatgcgtcctctctggagacttaaattcggatcgtccggcagtaacggatagaaggggagtttgaagaaactgtgcatcgtacttcctccggcgttgatggctgcgatgccggtaggtgcgagaacgacatgtttcttcttggtatgttcgcagacataacgtaggaatgtagatttacctgtacccgcttttccggtcagaaaaaccgactggcgggtatactgaataagattcagggcgtcctgaaaagctgcgttattagtgtctacgctcataaagttagtgacggataagcagatgtgctgaccggataaatgaattagataatcccgaaatgtttcatagccttgctgatgccgtcctcatcaatgggggctgtcacatagtcggctgcggcttttacatcctctttggcctgccccatagcgactccgatagctgcgtggcggagcatgctgatatcgtttcctccgtcgccgaaggacatcgtttcttccagcttgatgccaaagtgccggatgatttcatcgatgcctttctgtttggtatcgcctttggctgtgacatccgcaaaagccggataccagcggcctatttcgcaagtcgggatggatggaagcacttctttttcttcttcctccgtgatgaagggagtcatctggatcacttccttattgcttgcttcttcaaaggaaactgtcgggatgacatttacatgcaggaagtcataaaagatcttcttcaccatctcattcggttggcaaacagagatattatgctcctccacgaagatgcaggggactcctttcttttcgcagaaagcagccattgcttttacttcttcctgcgggatggcacttttgtaaattacttcttctccgacaaaacaataggctccgttcatggttatatatccatcgatcaggttccggtcctgcaattcggaaagattgttgataatggctttcgggcgtccggtagcgataaatattttaagcccttttgcgtgggcggcttccaatgcctcaatggtagaagacgggatacggtgtgtttcgaaactaaccagcgttccgtctatatcaaaaaataaagctttcgtcataaattcctttttgaattgagtacaaatgtactacttttgtctcacataacataaaaacctcatgcagtatgaactataattttgatgaaataataaaccgtaacggtacggactccgtaaaatgggatgctgtagaacgccgttgggggcgtaatgacttgattccgatgtgggtggctgatatggatttccgcacagccccttttgtaatcgatgccttgaagaaacgtctggaacatgaagtgctgggctatacatttgcctgcaaagaatgggccgaatccattattaactggctcaaagaacggcatggatgggagattcgtgaagaaatgctgacgtttactcccggcattgtccgtggactggcatttgccatccattgtttcacggagaaaggagacaaggtgatggtcatgcctcctgtctaccatcctttctttcttgtgacacagaagaacgaacgtgaagtggtttacagtccgttggtattgaaagacgggcaatatcatattgatttcgaccgttttcgcaaagatgtgcagggatgtaaactgcttatcctgagtaatccccataatccgggcggacgtgtatggaccaaagaagaactgtcgcagattgccgacatctgctatgagaacggtacattagtaatctctgacgagattcatgccgacttgaccctgcctccttacaaacatcccacctttgctttgatttcggagaaagcacggatgaactcccttgtctttatgtctccgagcaaagcgtttaatatgcccggactggcaagttcgtatgcaattattgagaatgacgaacttcgtcatcagtttcaggtatatatggaagcgagcgagttctccgaaggacacttattcgcttatctcagcgtagcagcagcctacagtcatggtactgaatggctggatcaggtcattgcctatatcaaaggaaatattgacttcacggaaagttatctgaaagagcggattcctgccatcagaatgattcgtccgcaagcatcctaccttatctttttggattgtcgtgagctgggattaagtcaggaggaactgaatcgcctgtttgtagaagatgcccacttggctttgaatgaaggaacgacgttcggcaaagaaggtgaagggtttatgcggttgaatgtagcctgtccgcgtgctacgctggagaaggctttgaggcaattggaacaagctgtcaacaataggtagaagttttgtcgaatgctttacacaaatccggtaacataatacctgttttttattcctcacaaagatatacagacactcactaccagacaacggaaaagggcgataatatatttgataaccattttaatttataacgattatgcgaatatttttcctgatattcctgcttgcttatgtaggtggtaatgtttatatctttatccgtacattacagatgctttccggcttctcgctggctatgaagattctgttgtctgtcgtctattggctggtagctttctcgttggtgatagctatgctgacccgtcatatagatatgcctgtcatcctgtcgaaatccatgtttcacatcggttcggtatggctggtgtttacactgtacatgatttttgctttgttgatagcggatgtgacgagaatatttgtgccgtcactgaatcacggtttctattatgcgttgggagcgacttgctgtctgcttctgtacggttattataattaccgtcatccgcaggtcaataagattgatgtcttccttgataagccgatagaaggtcacggaatcaatatcgtagccgtgagtgacgtccatttagggtatggtacgggaaaagctatgctgaaagaatatgtagatatgataaatgcacagcatcccgaccttatacttatcggtggagatttgatagacaatagtcttaccccattatataaggagaatatggcggaagaactggcacggctgaaagctcccttgggcatttatatggttccgggaaatcatgaatacatcagcggtattgatgaaagcgtccgcttcttgaaagatactcccatacaactattgcgtgattccgtagtaacattgcctaacggtgtgcagatcatcggacgtgacgaccgttccaaccgttcccgtcattccctgcctaccttattaaagcaagcggatcgtagtaaacctatcattcttttagatcatcaaccctacaacctggccaaaacagattctttgggaatagacctgcaattcagcggacatacgcatcatggacagatatggcctatgagtctgattacagacagaatatatgaacagagtcacggctatcgcaaatggagtcaatcacatatctatgtttccagcggattatctctttgggggcctcctttcagaataggaacaaacagcgatatggcggtatttcatctgaatcagatggcgaaatagtactcactaaagtttcaatatcagaaaatataactatatttgtagcgtatctccgcaatggagatacgcttttttattttggagatagcgtttttattatctgctctcataaatctggtaaatttagtattcgcagataataagtaaccggtctccacgtctttgttgtatataagtttgttatatacctcatgggcgtgggactattgcttattattcgaatacgggcttaccagagcctttgagagggtaatgtagtaatagtttccgcgcccttcttttttgtggcatgcgggaacacacacaaataaaagaacagaaaattatggatgattctacttgttgcggtacctgcctgatgaagtctgatttacagaactccaccgacaaatttgcctttcttaaagacaactggcctagctttggacaaattgaaagtattgataaactgtcaaaacaggaacttaactgtacactctgtttccttaatgttctcattgatgagttcgtgaatgaaaagtctgcttgtccaaatcgtgttatcacccgtttggtgttgatacgaatatatgttcagaatagtatggaactcatggaattaaaagaattacaatcagaacaagagaagtcggatggggggaaataggttaattcagctagttttttctcccaatgaaaaagtcatctgttttgctctcatgctctaactattcatctgtatccctttattcatcgcagtttcggctatggtagcaagagtggtggcaagtatgagagcaaacggttgctctcataccgttacattgtattttgaatcatttttttaatgttatcttctgatttttaggatattaatggatgataactcatactttgttgactgaaaatgcttgatcactacctgaaagaacaggtgaacggagacaaccgatacggttgagttaatccaatcatatggtcgatctaatttgattaacaggtgtttcagaaagtttcctatgcttgaaactagagtttcaaactgatgaaactttagttccaaactgatgaaactttagttccaagcctcagaaactttagttctaagcctcagaaactttagttccaagcttcagaaactttggttccaagccttagaaggattatcatctgttttgtacaaactcttttatcataacacttatatgtttattactttgtaattttgacgatgcggaatggaatgactgcaatgattgtacttaaattaatttaatatctgccatttagaaaaagtttgctaactttgagcttcaaacatatcataaatacaatgaataaaatagcattcattctcatcatgaccggtatgttctttataaaaggatatgcccagcggacagaagtactgacactaggcgtctttcactttgactttccgaatctcgatatgcaacaaatatccgaagaagatcagattaatgtcttgtcgcctgtttatcagaaggaaatagagttaatagcgagtaaactggcgaactttaagccggatgcaatcgtcattgaacacccgctgggcggacagcaaaaggttgattctctatttaaagcataccttgccggaaatcataaactgtcaaagagtgaagtgcagcaactgggtttcaggattgcaaagatgtgcaaagcaaagatttactgtgcagatgcacgggggacacaaacagcccgtatcgaagaactgctggaagacgatagcacgaaacaatatcaggattttgaagagagttttgtaaattctcccgactcatctttatattccaaagaccagttaatattcaagcaaaaaggaatacttccccagctgatacatctgaatgatccccgacaaatcaagaaagacctgggcaattatcttatcggacacttcaaatacgaatccgataagggagattatacaggagccgatttcgaatcaggaagatggttcaaccgtaatctgaggatattcaggaatatacaacgtaccccaaaatccgccaaacggatacttgtgatctttggtgcggcacacatgaatctgctgaactatctgtttgaatgttcacccgaatataaattgctgaatgtgaatgactatctgaaaacaaattcgtaataacggaggtttaccgtataggtatatgcatccggggtggtccgattgtcggaccggatggaccgcctatgcctctgtttttatcaaaaacggcattgcggagaatctcatatataataccgcccacatccaaacccagagtgaacttatcgaaatggtagtaaggaatcataacgggaaccgtttcccaacgtccgctcatcgcatcatagtatcgctgtactcccatttccatcccgaagcggtcggacatatcgacggacatcgtagctccgtagctatgggtgctcattccgtaagagtttctgatgtcgtatgatccgaagactttcaaggtgacacggtcggaaggatggtaaaggaaggcgcccgaagtgctgaaagcctgtccggtgatgtgggacatgttgaccttcagcgcattggcacggacttgtaactcgaattgctcattgaaaatatgctgataacctagtgaagcactgttgaaacgcccgatgcctgccatacttgtctgacttccggaaccgaacagtgctccacgatcgaattgatgcaataccccgcccgtactgtaatcacctcggaagagtagggaaggattggtctgataaggtagggaaatatcccttttgagtgaaaagcggggtatatgctccaactgtccgggtgaatataaagaatatgtagtgctcttttctggaaacaagttaatgttggcctgttttagtacgtcgtccggcgttatggatgcaccgttacgaagtatgtgcgtactgtcgttgttttcttgcgcagagagtgattgcggaacaaaatacagcaaaagaaagattcccaaacgaattggaagctgtgatatgctaactttttgtctcatacgcatttgccctccttagtttttatgataggttatgtacaaaaataatgaaatcccatttgaaaagcaaataatgtgtaatgtttccttccatccgcaggcttttttaactcaaataagagcggataagattttttctgaataaattcccttttttcccttaaattcttctctctctcaggcaatattcgttgtatatttgttattatagatataagagtatcaactatttaatttggaaggaatatgaagaaaaaacttacgggtgttgcattggtgttagctgccgtctctttgatgggcatacagccggcggaagcatgtacgcgtgccgtatatctgggaccggacggaatggtggtcactggtcgcacgatggactggaaagaagacatcatgtcgaatatctatgtgtttccacgtggaatgcagcgtgcgggacacaataaagaaaaaacagtaaactggacttccaaatatggaagcgtaatcgcaacaggctatgatataggtacttgtgacggaatgaatgaaaaagggctggtggcaagcctgcttttcctgccggaatctgtttattcacttcccggagatacccgtccggcaatgggaatcagtatctggactcaatatgtacttgacaattttgcaacggtgcgtgaagcggtagatgaaatgaaaaaagagactttccgcattgacgctccccgtatgccgaacgggggaccggaatctactttgcacatggctattaccgatgaaacgggtaacacggcagtgatcgaatatctggatggcaaactgagtatccatgaggggaaggaatatcaggtgatgaccaattctccgcgttatgaattgcagttggctgtcaatgattactggaaagaagtgggcggattacagatgttgccgggaacgaaccgttcgagcgaccgttttgtgcgtgcctctttctacattcacgccattccgcagactgccgatgcaaagatagccgtccccagtgtgctgagtgtgatgcgcaatgtctccgttccgtttggtatcaatacaccggagaagcctcatatttcttctactcgctggcgttccgtttccgatcagaagaataaagtgtattactttgaatctactttaactccgaacctgttttggctggatttgaagaagattgattttagtccgaaggctggggtgaagaagttgtccctgaccaaaggagaaatttacgcaggagatgccgtgaaggatttgaaggatagtcaatcatttaccttccttttcgaaactccggtgatgtaattgttagttatgtggtaagatgtctttttttgaataaaaaggaacggtaggcaaaggatttatccgcttgtctaccgttcttcttttaatttcgtgtcctgcgtgcggctataggcagcctttatcttttcgcatattcctgatggaactcaaccaccgcctctattcctttccggaaaatgtccagcgagaagttttcgttgggtgaatggattgcatccgattcgagtccgaagcccattaatacggttttggttcccaatacctgttcgaatgtcgaaatgataggaatgcttccgccgcgacgcactgccagcggttttttgccgaaagctatctcaaaacctttttccgcagcctgataggcaggaagggaaatcgggcagacatacccttgtcctccgtgcatcggagttacttttacctggacagtgtcgggggccatttgtaagatatagtcagcaaacatctgcgaaatcttgtgatgatcctgatgcgcaaccagtcggcaggaaactttcgcatacgctttcgaaggaaggactgtcttggagccttcacccgtatatcctccccaaatgccgcatacatcgaaagacgggcggcaactgttgcgttccagtgtgctgtatcccttttctccgaagagttctttcactccgatggcttctttgtatttcttctcatcaaacggaatatgggcgatcatttcccgttctgcttgtggcacttcttctacgtcatcgtagaatccggggacggtgattcttccgtctttatctgttactttgctgattatttcgcaaagtacattgatcggattagctaccgcacctccgaagtgtcccgaatgcaggtcacggttcggtccggtcacttctatttcccagtaagccagtccgcgcagaccggtggtgagggatggaagttcggcacccagcatgctggtatccgaaaccaggataacgtctgctttcaacagctctttatgctcttcgcagaaggcttccaggctgggagagccgatttcctcttctccttcgaagataaacttgacgttatttttcagcagttcgttcttgacgagatattcgaaggctttgacctggataaaggattgtcctttgtcatcatccgctccgcgtgcccagatgtatccgtcccgtacttcgggttcgaagggctggcttttccacagttccagcggttcggcaggcattacgtcgtagtgggcgtagaccaatactgttttggcattcgggtcaacgatcttttgtgcgaaaacaatcgggttacccttggaaggcatcaccaatgcttcctccactccggcttcgagcagtagttgtgcccagcgttgggcgcaagccagcatatcgtcgtgatgttccggcagggcgctgatactgggaatacggatgaggctgaacaggtcctccataatcttcggttcgttcgctgcgatatatttttgaatttcgttcataatgaatagtttactggcggttatttagcctatgtgccaatagcctgacagatttttagtgcaggtattggcacatgggtagattgacatattgatacttattaaagctgcgttgtcttatccaacagataataatcaaggatggtcatggcagccattgcttctacgataggtacggcacgtggcagtacacaggcgtcatgacgtccgcgggctttcagtgtcgtatctacgccgtcgatgttcaccgtttcctgctccatcagcagggtagcaatcggtttgaatactacacggaagtaaatatcctgtccgttactgattcctccctgaatacctccggagtggttggtatgcgtttcaatccgtccgttgttgttgaagaatacgtcgttctgctcggagcctttcatcttcagtcccttgaatccttctccatattcgaaggctttggcggcattgatactgagcatggcgttgcccaaggcggcgtgcagtttgccgaacacgggttgccccaatccgataggacatcctttgatgacacaggtcagcgtacctccgatggtatcgccttcgccttttaccttatatataaggtctgccatttccttcgccttttcagggtccggacaacgtacatcgtttgtttcgatcaggtcgagatcatagtcggaataagtgccttccaatttgatggcaccgacttgcgatgtataagctgtgatgctgattcctaactggcgaagggctaatttagccaatgcgccggctactacgcgtgaaatagtctcgcgggcagaagaacgtccgccgccgcgatgatcacggatgccgtacttcactttgtaggtgtaatccgcgtgtgaagggcggtatacctctttcaggttattgtagtcattggaatgttgattctcgttccaaacgataaatccgataggacatccggttgatttgccttcgaagatgcctgaaagaaactccactttatccgcttccttgcgtggtgtggtgaggatggattgtcccggacggcgtcgatttagttcttgttgtacaaattcttcgtcgattgtgattccggcaggaaatccgtcaattactcccccaactccttttccatgagactcgccgaagctggtgagccgaaagatgttgccaaatgaattaaacatagttgtggcttttttaaaattactctatgcaaatataacaaagtttttgataagaaggttgtgaattcaaaatatcttcggaaaaggaagcaaattgaaccttttttcctctttttagtttataaatgacgattatttaataactaaacccgaaaattatgaaaaagaatctattgtatttgtgggcattgatatgctctgtctctcttttgacggcttgtagcagtgatgatgataatacggtcaatgatgaaacgactcctccggaagaagaggctgtggtgactgctcccgatgtggtgggaacgtattggggaaatctcgatatttcaatgctgcccgatggctctgaccaggaagttgtgattgccgacggacttccgaagtttattactttctcccaggtcagtgatacggaagtaaagatggaactgaaggaatttgaactgtttataaacggaaacatattaaagttcggcgatatcgtgatagacaagtgtgcagtgaaaaaggaaacggacgtttcgactttcaccggacagcaagaccttacttttcagggggatgccgctgctctgggtacctgtgccaccagtatagaaggaacggtgcaaagtggaaatgctacaatgaatattcaggtaaaagtacctgcattgaagcagaccgtgaaagttgctttctccggtgtgaagcaggtggaggaatccggtaaggattaatccgtctttggtcagctagaaagcatatccgaatccgatattcaagtagatcggatacatagcaaaagtaatggtctgaaagtcatttctgaagatatcattcaatccccaggtgaggtctgcatatatattgagatgtttgaatgctctccatccggctcctatttgcaggccccactgaaaatgtctcaggtcgtccgagaagtcataagtagcgattttaccatccgtaaattcgactttggggcctacggggtcgccttcacgcaggtatccttcatatacgtgccccgaaaattctcttgaaagcagatacgaaaaataaggtccggctttaatattccaacggttgctcaacttgtaagtagccattagaggaattgtcagtccggaagtgtggactttggttttgactcctcctgtccagacaccgctgattctttctcctccctgtccgaggatttccatattatagtttttgacggtggcttccgttgtcatggctttattctccagccgcagccctacaatgactccgagcttgttttgaacggcaaaccatttggttacttctcctccgatgctgatagccagcgttgggttgtagccgtcaatcgaacggatttcgacaggcagcgggagcggggctgtaccgccgatgctgaaccctgctttgatttcatattccagtccgtgaagagcggaacggataagcgtttcgtttctgtcaacctgtgaatagccggggagggctattaccagacaggcgagtaaactgaatatataggaatggattttcatcttttcattattattaaatcattagttatttcattatagttgctctgttctgccttccatagctgctatcagatcgttggtcgaatggaatcagtcttccgagcgatagattagttcgacttcatcaatcaacaatgtacttccgatagctccgttaaaatgatctccttccaggctggaagtgaatacgatagctacattatactttcctgctgttagcttctctttatctatgtattttccggataacatatggaagggaagtttaaagtatgtccactcgtccgtctctttggcgtcgtcaatgcgtgctattgaaaccaggttgggactggtgaaagcattcgttccgtcaagagtcggcacagattcactggtctcatacatgatggcataaatatcgcatatatcccgtttgccactgacgggtttgccgccttctgtaaactgatctccggctttatacttgtaatagcctgccagataagttggtatatgccggaaaggcagaccgaatttggtcgctttcagtggattgctcattgcatttcctacatcaaaagagccgataaacaggttcccggctgcgataggcattcccataatgctaccgaagaatccggtactgcgggttactaaggacaggcattttccggtttttccgtttgcaaactgaaaagtcggatagtcgtcggctgtcttgggaactccggtcattgcataacctgcgtttccgctggcccattccatcaccactttttctccttcccgttctacgaagatgtagtatttctgtccgccgagcgtatcctcaaaattgtaaatagtagcaagttccgtatcaataacggatacggtgtacttcttcttccaaaagccatcggcagccgtaacggtatattgctgaggcgaatggaaatctctagccgtcccactgggaggatcgatagtggctcccggagtcaatgtaaattcgggtgcaagggatgaaatgtccgttcccggtcctacaaatatattgatggaattattagtgataatcggactcgttgtcatgactactcccggcaatctgcaactgagtatgtctgcctctgcattgggagcttcttcgcgaatgcaagaagaagagaaaatggctagcagcaaataaagaataccgtgttttgctttcatttttctactattctaactgttaaagttcggttcttggaagattttataacaatttgcaattttatttgttcactaatggatgtttgataaaaaagaattttctacttttgtggaaactaaagccttatagggtatgattgaatcggaaagaaaacagataatagacttgatcaaaaaagaggtgattccggcgatagggtgtacggaacccattgcggtagcgctttgtgtagctaaagctgccgaaacattaggaatgaaaccggaaaagattgaagtgttattgagtgccaatatattaaagaatgcaatgggagtcggtatccccggcacagatatggtcggacttcctatagctgtagccttgggagcgttgatcggccgatcggaatatcaattggaagtgttgagagactgcacaccggaggcagtagaacaaggcaaactgtttatcgcagagaagcgaatctgtatttctctcaaagaagatattacggaaaaactgtacatcgaagtaatctgcacagccggcagccaaaaagcgacggctgtgattgccggcggacatactgcctttgtctatatagctacggatgaaaaagtactgcttgacaagcaacagactgccaatgaagaggaagaagacgcttcactggaactgaatctgcgcaaagtctatgattttgccctgacatcccctctggatgaaatccgttttattctcgatacggcacgtctgaacaaagcagccgccgagcaagcctttaaaggcaattatgggcattctttaggtaagatgctccgtggaacgtatgaacataaagtgatgggtgacagcgtattctctcatatactatcttatacttccgccgcttgcgacgccagaatggccggtgcaatgattcccgtcatgagtaactccggcagtggcaatcagggcatatccgccacacttcccgttgtcgtatttgccgaagaaaatggtaaaaccgaagaggaactgattcgcgccttaatgctgagtcatctcactgtaatctatattaaacaaagtttgggacgtctctctgccttgtgtggctgtgtagtagctgccacgggttccagttgcggaatcacctggctgatgggtggaaactataatcaggtagcctttgccgttcaaaacatgattgccaacctgacgggaatgatttgcgacggtgcaaaaccgagctgcgcactcaaagtaacaaccggagtctcaacagccgtattatctgctatgatggcaatggaggaccgttgtgtgacttctgtagaaggcattattgacgaagatgtcgatcaaagcattcgtaacttgacaagaatcggctcgcaggccatgaacgaaacggataagatggtgcttgatatcatgacgcacaaaggaggatgttaacaggtaataagtaacaagtaataagtaataggtaatagctggaataacggcataaaaaaagtattaagtattaacttccgcctatatccgcatggaattaatacttaatacttattacctattacttaaaattagtggcagtgtccgccttcgcaaccgcagtcatcgccacagtcgctgccgcagctgtcgcatccgcaaccgcaaccttcaccgctcatcatcttcaccagttcctgaatttcttcgttggtagcaggacggctttcgattacttcaccttcaaagatcaggtcagcgcctgccaatgggtggttaaggtcaactactactacatccggtttgatttctacgacgctggcgtttacgcgttgaccgtctccggtcatcaaaggtacaatgctgccttctgttacgcgttcgctgtcgaacttgccatctatttcaaagatatttttaggaagatcaaatacatgttgctcatcgtaggctccgtaagcttcatctgccggaatggtaaaatcgaatttatcacccttagaaagagctgttatctggttctcgaagctttcgagcgttgtgcctaatcctgaaatgaactgaaaaggatgttctgcatttgtttcttcgaacaattctttttcaccatcttccactgtatatagcttatatgcaacggtgatgtacttgttttctactgtttccatctgatatttatagtttctaattaataaatcccttatttagggtggacaaagatacgaataatttgcttgctaccgggtgcatacggagtaaatttcagattattaagcgcttttgtcagaaatggacagtcattctctactaactgatagttgcaaattcaacctttaagtgataaaatttaggtttattaccgttcttttcttacgattattcgctttttagtgatttttttcttcgatttgtttggagataataaaaaagcccttacctttgcagcacgaaaataaagaaaagaagatatgaatatattacatacatctattaacctagcagttctgcatattattcgcgtcgtggtggtgccatcaagagcgtgagaaaggttttgtgtatgtattcgtaccataaaagatagaatttggagcctttctcactgatgtgagggaggctctttaattaaaagatagattgaaatgaaaaagcaattacgcagttcgtttagtacacaaggccgtcgcatggcgggagcccgcgcattatgggcagccaacggcatgaagaaaaatcagatgggaaaacccattatcgctatcgtcaattcgtttacacaatttgttccgggacacgtgcacctgcatgaaatcgggcagttggtgaaggcggaaattgagaagctgggatgcttcgctgcggaatttaatacgattgctattgatgacggtatcgctatgggacatgacggaatgctttactcgcttccttcccgtgatatcatagcggacagcgtagaatatatggtcaatgcgcacaaggcggatgcaatggtatgtatcagcaactgcgataagattaccccagggatgctgatggctgccatgcgcctgaatatccctaccgtatttgtatccggcggaccgatggaagccggagagtggaacggtcagcatctggacttgatcgatgccatgattaaatcggcggacgacagtgtaagcgatcaggaagtagcgaatatcgaacagaatgcctgtcctacctgcggatgttgttccggaatgtttacggcaaactcgatgaactgtctgaatgaagctatcggcttggctcttccgggaaacggcacaatcgtggctacgcacgaaaatcgtacgaaactgtttgaagatgctgccaaactgattgtggaaaatgcaatgaaatattatgaagaaggtgacgaaagtgtacttccccgcagcatagctacccgtcaggcattcctcaatgccatgacgctggatattgcgatgggcggttctaccaatacggtgcttcacctgttggccgtggcacatgaggcaggagtcgatttcaagatggacgacatcgatatgctgtcacgcaagacaccctgcctgtgtaaagtcgctccgaatactcaaaaatatcatattcaggacgttaaccgtgcgggtggcatcattgctatcctggcagagttggcaaaaggcggtctgattgatacttccgttctccgtgtggatggcatgtcgctggcggaagcgatcgatcaatattcaattaccagcccgaacgttacggaaaaagcaatgagcaaatattcaagtgcggcaggaaacagattcaatctcgtacttggttctcagggagcttattatcaggaattagataaagatcgcgcgaacggatgtatccgtgatctggagcacgcctatagcaaggacggaggcctggcggtactgaaaggaaatatcgctcaggacggttgcgtagtaaaaacggcgggtgtagacgaaagcatctggaagtttaccggacctgccaaagtattcgactcacaagaagcagcctgtgaaggcatcctcggaggccgagtcgtcagcggcgacgttgtcgtcatcacgcacgaaggtccgaagggcggtcccggtatgcaggaaatgctttacccgacttcttatatcaaatcccgtcacctcggcaaagaatgtgccttgattaccgacggacgtttcagtggtggaacttccggattgagtatcggacacgtttctcccgaagccgctgccggaggtaatataggaaaaatagtagatggagatatcatcgaaatcgacattcccgcccgaacgattaacgtgcgactaacagatgaagaactggctgcccgcccgatgactcccgtcacccgtgaccgttacgtgccgaagagcctgaaagcatacgccagcatggtaagctctgccgataagggagcagtgagattaatagactgatccacttcattatccattatgaatcatccattatccattaaagaactatgagtaaggacttaataacaggcgcagaggcaatgatgcgctctctggaacatcagggagtgactaccattttcggttatcccggcggttccatcatgcctacgttcgatgccctgtacgaccatcaaaatacattgaaccatatcttggttcgccatgaacagggagctgcccatgcggcacaaggctacgcccgtgtatcgggtaaagtcggtgtttgcttggtgacaagcggccccggagcaaccaatacgatcacaggtattgcagatgcgatgatagacagtacgcctatcgttgtcattgcaggacaggtgggaacaggcttccttggaacagacgcttttcaggaagtcgatctcgtaggtatcactcagccaatcgctaaatggagctatcagattcgccgtgccgaagacgtagcctgggcgatagcacgtgctttctacattgccagtagtggtcgtcctggtccggtggtactcgactttgccaagaatgcgcaggttgaaaaaacaaaatacgagccgacgcagcaggagtttatccgcagctatgttccggttcccgatacagacgaagaatcggtaaaggctgccgccgaactgatcaataacgccgaacgcccgcttgtcttggtaggacagggagtggaactgggaagcgctcaggaagaactgcgtatctttatcgaaaaggcggatatgcccgcaggttgtaccttgctcggactttccgcattgcctaccgaccatccgttgaataaaggaatgctgggtatgcacggaaatctgggaccgaatatcaatactaacaaatgtgatgtactgattgctgtcggtatgcgtttcgacgaccgtgtgaccggtaatctggctacttacgccaaacaagcgaaagtgatccattttgacattgatccggcggaagtaaataagaatgtaaaggtagatattgccgttttgggcgactgcaaaaagacgctggctgctgtgaccggactgttgaaaaagaaccggcacaccgagtgggtcgatagtttcaaggaatatgaagcggtagaggaagaaaaagtcattcgtcctgaacttcatcctgcaacggattcactgagtatgggcgaagtggtgcgtgcggtaagcgaagcgacccgtcacgaagccatattggtgacagatgtaggtcagaatcagatgatctctgcccgctactttaaatataccagggaacgtagtatcgttacttcgggtggactcggcacgatgggttttggccttccggcagctatcggagctactttcggccgtcccgaccgcactgtatgtgtatttatgggtgacggcggactgcaaatgaacattcaggagctgggtacgatcatggaacagaaagctccggtgaagattatctgcctgaacaacaattatctcggcaacgtgcgccaatggcaggctatgttctttaatcaccgttattcatttactccgatgctgaatccggattacatgaaaatcgcttccgcctacgatattccttccaaacgtgtcttttcacgggaagaattgaaagtggctatcgacgaaatgctctcgacagacgggccgttcctgctcgaagcctgtgtggtagaagaaggcaatgtcctcccgatgacccctccgggcggttcagtcaatcagatgttgctggaatgttaatccttaatttagaaagttatgagtgataagacattatatacgattatagttcattctgaaaatatagccggattgctgaatcaggtgaccgctgtatttacccgtcggcaaataaacatcgagagtttgaacgtttctgcttcttccattaaaggagtacataaatatacgatcacagcgtggactgataaggacactattgaaaaggtggtgaagcagatcgaaaagaagattgatgtgattcaggcgcactattttacggaagacgagatttatttccatgagatagccttatataaggtatctactcctgcttttcaggagactccggaagcatctaaagtgatccgcagatataatgcccgcattgtagaggtgaatccggtattctctatcgtcgagaagaacggcatgagtgaagagattacttccctttacgaagaacttcgggctttgaaatgtgtgctgcaatttgtccgttcgggccgtgtggctattactaccagctgtttcgaacgtgtgaatgagttcctggacggacaggaagcgaagtataagcaaagtaaaaaggaacaggagtaatgagtgaagaaaataaaatagggacttatcagtttgtggcagagccgtttcacgtagattttaacggccgcctgaccatgggcgtgctgggaaatcatctgttgaattgcgcaggttttcatgccagcgaccgtggatttggtattgctacgctgaacgaggacaattacacatgggtgctttcccgcctggctatcgagctggatgagatgccttaccaatacgagaagttctcggttcagacatgggtagagaatgtctatcgtctgtttaccgaccgtaactttgccgtcattgacaaggatggaaagaagatcggctatgcccgttccgtatgggcgatgatcaatctgaatacccgtaagcctgccgatctgttggcattgcatggaggaagcatcgtcgattatatatgcgatgaaccctgcccgatagaaaagccttcgcgtatcaaggtgacaagcaatcagcctgttgcgacgctgacggcaaaatacagtgatatcgatattaacggacacgtaaacagtattcgttatatcgagcacatacttgacttgtttccgatagaactgtatcagacgaaacgtatccgccggtttgaaatggcgtatgtggctgaaagttatttcggagatgaactctctttcttctgtgatgaggcgaatgaaaacgagtttcatgtagaggtgaagaaaaacggcagcgaggtagtatgccgttccaaagtgatatttgaataatatagagtataaaatcaattaataacagatggcgcaagtcatcaaaacaaaaaaacaaaaaaaatggcacagttgaattttggcggaactgtagaaaatgtagttatccgtgatgaatttccattggaaaaagctcgtgaagtattgaaaaatgaaacaatcgctgtaatcggttatggcgtacaaggtcccggacaggctctgaaccttcgtgataacggtttcaatgtaatcgttggtcaacgccagggaaagacatatgacaaagcggttgctgacggatgggttccgggtgaaactttgttcggtattgaagaagcttgcgaaaaaggtacgatcattatgtgcctgttgtctgatgcagcagtaatgtctgtatggcctactatcaagccttacctgactgcaggaaaagctctttatttctctcatggttttgctattacatggagtgaccgcacaggtgtagttcctcctgcagatatcgacgtaatcatggttgctcctaaaggttcgggtacatccttgcgtactatgttccttgaaggtcgcggcttgaactcttcttacgctatctatcaggatgcaacaggcaacgctatggacagaacaatcgcattgggtatcggtatcggttcaggttatttgttcgaaacaactttcatccgcgaagctacttccgacctgacaggcgaacgtggttcattgatgggagctatccagggtctgttgctggcacaatacgaagtgttacgtgaaaacggtcatactccttccgaagcattcaacgaaactgtagaagagctgactcagtcattgatgccgttgtttgcaaagaacggtatggactggatgtatgctaactgctctactacagctcaacgtggtgctctcgactggatgggccccttccacgatgctatcaaaccggtagttgaaaagttgtatcacagtgtgaagactggtaacgaagcacagatttcaatcgactctaactccaaaccggattatcgtgagaaactggaagaagaactgaaagcattgcgcgaaagcgaaatgtggcagactgccgtgacagttcgtaaacttcgtccggaaaataattaatcagacttatactatataagtttttcaaaaggcgggaaaagcgtattttcccgctttttctatgtagataccggtcttttgagtaatagaaaaaggatgaaagtagaaaaaaagattaaaagatactgataatataggtgaaaaagagcatttatgattacctttacggcaacaaataaaacagaataggcaatgaagaaactttttacttacagaagatcgatacgtatgaagatgatttcttctttaataaatagtatatcagaatgttacattaaaagatatttaagttattctctaccgaatggtagctgtaataccatttcaagtcctttttatatttcgtgttccattagtgattcgttgatatgatgcagaattttattctgtagcaggaaaaagtatgcgttaaattgaatttaagacagagcttttggaacagaatttagtgggaaaataacattgtttgttttgtttgtaaatgggagtcctctttcgtgagaaagggggcttctttttttatcccgatgattcaggaggataccgcttcctgccggatatactgtatcagtttccggtagaacgcatgcttggtaagagtggttgcatctcccaaaatcacaagtttcatccgggcgcgggtaatggctacgttcattcgtcttaaatcattcagaaaaccgatctgtccgtcctcgttcgcccggacgaggctgataaagacgacatcccgttcctgtccctgaaagccgtctaccgtgttgaccgtgatgaggctgcggaaagggcggagaaaactgcttcctctgattttacttctcaggtattgcacttgcgccttgtagggcgaaatcagaccaaagtcgatgctctcgtccaggatgcgtgctttgccgatccggctgatataggcttccagttcttgcagtaacaagttggcttcctgcttgttgatgcgcccgaagctctcgcctacaaactcttcgtggaagtccatttccgaggtatctatccagttcatgggagtgtcgaagtcaaggataccccggttgcgcacttccggtgcggcttccagttctccgttgtagaaccattcggagggaaagcgcatgattgcctcgtgcatccggtattgcactttgagcagcgagacggcagaaggtttttgctgcacgactttttccattaaagtatggtccagtccgccacgggcggcttcgatacatttgattgtaggagggagctggcaatggtcgccggcaagaatcacacggtcggcctttcggatggcgatccaacaggcggcttcgagtgcctgggcggcttcatcgataaataaggtggggaaacgccttccgttgagcaaacggtgattgctgctgaccagcgtagaagcaatcacacgggcactgtcgaaaagatcggcgttgatcaggatttccagttcggtggcacggtcgcggaggcggctcatccggctgcgcattccttccctttcggagtaacttccccgacgcatccggctgcccatttcacggattgattttcggattccccaaagttcggggtagctcggatgattctcaaagcggcgttcgtaggtgaaagagagcattttatcattaacacgcgtaggattaccaatgcggagcacaggaacaccccggtccaccagtttctcacaaatccagtccacggccgtattactttgggcgcagaccagcacctgcggttcgcggtgaagcgtttcgtaaatggcttccacaagcgtggtagtctttccggttcccggagggccgtgtacgatggcgacatcgcgtgtgcataacactttgtttacggctgtctcctgcgtgctgttcagccacgggaaacggacgggatacaattcgcggaatcccggcttttgtgttcccagcaaggtgtcccggagttcggcaaggcggttgcctttggcgcggatcgtgtcttccagcgcttcgaacatggcacgataggacgtttcatcgaaataaagttgtacacccagcacctcttccgtttgcagttccagcaatgcgcctgcactgggaagcacgaccaccatccgttcatcgtccgcataactcaccgttgcaatgaaattcatataattcactttcccgtcaaatgactgacggaaaaagcagacgggacgaccgaattcgaaggaatgctcgatttctttattttcggtgcgtgtaatatctattacaagttgatttagagaattatagtaacttcgaccgggagaggcgggataccagcacagaccacgtttcactttgcgggcgacacccattgtttcagtctgccgcttgaattcctccttttcgtgttcatactccatgcgtagcaggagttgctgttgctgaaggtcgatgattggacttttcggatgattattcataatagatgcaaaggtagtaaatcttcctcctgagacgaaaatatatttcattttgttaaacattcctcgaacgccgttcgttatttttatagatagactaaaaaaaataaaagcaatatggtgtatgatttgactatgttagaggctttttattctgcttataaaggaaaagtggaacacgtgcgggctgttttgaaacgccctttgacgttagccgagaagattctgtatgcccacctgttcaatgagggcgatgtgaaaaactacaaacggggtgaagactacgtaaatttccgtcccgaccgcgtcgctatgcaggacgcgactgcccagatggcattgcttcaattcatgaatgcaggaaaagaaaaagtggctgttccctccaccgtgcactgtgaccacttgatacaagcgtacaaaggagcaaaggaggacattgctacggcaaccaaaacaaacgaagaagtttacgactttttgcgcgatgtatcctctcgttacggcatcggcttctggaagccgggcgccggaatcattcaccaggtagtgctcgaaaattacgctttccccggtggaatgatggtaggcaccgactctcacactccgaatgctggaggactgggcatggtggccatcggcgtcggcggtgcggatgccgtagacgtgatgacgggtatggaatgggaactgaaaatgccaaggattatcggtgtccgcctgaccggaaaactgagcggctggacttccccgaaagatgtgatcctgaaacttgctgggattctgaccgtaaaaggaggaacgaactccatcatcgaatatttcggaccgggaacagcttccctgtcggctaccggcaaagcgaccatttgcaatatgggtgcggaagtaggagctaccacttcgcttttcccgttcgatgggcgcatggctacttatctgagagccaccggcagagatcgtatcgtagaactggcggaagccgtggactgtgagctccgtgcggaccaacaggtgacggacgaaccggaaaagtactacgaccgtgtcatcgacatcgatttgtctacgctcgaaccttatatcaacggccctttcacaccggatgccgctacccctatctctgaatttgcagaaaaagtattactgaacggctatccgcgtaagatggaagtcggactgatcggttcgtgtaccaactcttcttaccaagatctcagccgtgccgcatcccttgcaaggcaggtgaaggaaaagaatctgagtgtggcttccccgttgattatcaatccgggttccgagcaaatccgcgctactgccgaaagagacggaatgatggatgacttcatgcagatcggcgccgtgatcatggcaaatgcctgcggtccttgcatcggtcagtggaaacgtcatacggacgacccgacgcggaagaactcgatcgtcacatccttcaaccgtaactttgccaaacgtgcggacggcaatccgaacacatacgcctttgttgcttctcccgaactgacgatggcactgaccattgccggtgatctttgcttcaatccgctgaaagacagattgatgaaccatgacggcgagaaagtgaaactggccgaacccgtaggagatgaactccccttgagaggtttcacctccggcaatgaaggctatatcgcccctggcgggacgaaaacagcgattaacgtcaacccggcttctcaacgcctgcaactgctgactcctttccccgcttgggacggacaagatatactcaatatgcccctgctgattaaggcgcagggcaaatgtactaccgaccatatttcgatggcgggaccgtggctgcgtttccgcggacatttggagaatatttcggataatatgctaatgggagccgtgaatgcgtttaatggcgaaacgaacaatgtgtggaaccgttcgacaaacacttacggaaccgtttcgggcacagccaaaatgtataaatccgaaggaatcccctccattgtcgtggccgaagaaaactatggagaaggctccagccgtgagcatgcggcaatggaaccccgtttcctgaatgtgcgtgtgattctcgccaagagcttcgcccgtatccacgaaacgaatctgaaaaagcagggcatgcttgcccttacctttgcagacaaagcggattatgacaagatacaggagcacgacctcctttcagtcatcggcttgccggactttgctccgggacggaatctgaccgtcgttctccatcacgaagacggaacgaaagagagttttgaagcgcaacatacatacaacgaacagcagattgcctggttccgtgccggctctgccttgaatgccagataattaaaatgatagaaatgaacaaaataaccatgcaaaaagatggtacgctgtcggtgcccgatgtgcctgtcgtaccttatattaccggagacggagtaggagcggaagtgactccgtcgatgcaggccgttgtgaacgcggctgttcagaaagcatatggcggcaaacgccggattgaatggaaagaagtgctggcgggcgaacgcgctttcaacgagacaggctcttggttgccggatgaaacgatgaaggctttccaagaatatctgatcggcatcaagggtccgctgacgacccctgtcggcggtggaatccgttctttgaacgtggctttgcgccaaactctggatttatatgtttgtttgcgtccggttcgttggtatcaaggcgttcattctccggtgaaagcaccggaaaaagtgaacatgtgtgtgttccgtgaaaatacggaggatatatatgcaggaatcgagtgggaggcaggtactcccgaagccgaaaagttctatcaattcctgaaaaacgagatgggagtgacgaaagtccgcttccccgagacctcttcttttggggtgaaacctgtttcccgtgagggcacggaacgtcttgtgcgggctgcctgccagtatgcgctcgaccatcatctgccttctgtgacactggtgcacaaaggaaacattatgaagttcaccgaaggaggtttcaagaaatggggctatgagctggcgcaacgtgagtttggcgacgcgctggcagacggccggctggtgataaaggactgcattgccgatgcttttctgcaaaatacattactgattcccgaagagtattccgtgattgccacgctgaacctgaacggagactatgtttccgaccagttggcggcaatggtaggcggcatcggcattgctccgggagcaaatattaactacaagacggggcacgccatttttgaagcgactcatggaaccgcccccaacattgccggaaaggatgtcgtgaatccttgttctatcattctttcggcggtgatgatgcttgaatatctgggatggaaagaagcggccgcgcttatcgaaaaggcgctggaacagagtttcctcgatgcccgtgccacgcacgatctggctcgctttatgccgggaggtacatccctgtctaccaccgctttcacacgcgaaattgtggaaagaatcgaaaagtaaatgtaacgattaaaaacgaagtattatgaagaaagagtatttgatttacaagctctccgaggagatgaaagaggcaacccggattgacaatgaattgttccccaagtttgacgtgaagcgtggactacgtaatgaagacggcaccggtgtattggtaggtctgacaaagattggtaatgtggtgggttacgaacgtatccccggcggcggtctgaagcctattccgggaaaattgttctatcggggctatgatgtggaagacatttctcacgccatcatcaaggaaaaacgtttcggcttcgaagaagtggcttatctgctactctccggtcgtctgccggacaaggaagaactggcttcgttctgcgaactgatcaatgacaatatggcgctcgagcagaagacgaaaatgaatattatcgagctggagggaaataatatcatgaatatcctttcgcgcagcgtactcgaaatgtatcgtttcgatcccgatgccgacgatacttcccgcgacaatctgatgcgccagagtatcgatcttatctccaagttcccgaccatcattgcgtatgcttataatatgctccgccatgctacattcggccgttccctgcatatccgtcatccgcaggaaaaactctctattgccgagaatttcctctatatgctcaaaaaagattatacggaactggatgcccgtacgctcgacttgctattgattttgcaggcagaacatggcggtggtaacaactcgactttcacggttcgtgtgacttcttccaccggaacagatacatattcggccatcgccgcaggtatcggttcgttgaaaggcccgcttcacggaggcgcgaatatccaggtggccgatatgttccatcacttgcaggagaacatcaaggactggaagagcgtggacgagatagatacctatttcacacggatgctgaataaggaagtgtataataagaccggactgatttacggtatcggtcatgctgtttatacgatttccgatcctcgtgcgctgttgctgaaagaactggctcgcgaccttgcccgtgagaaaggaaaagaagaggagttcgctttcctcgaactgcttgaagagcgtgccatcgctactttcggacgtgtgaagaacaacggaaagacggtttccagcaatatcgacttctattcgggtttcgtatatgagatgattggtttgccgcaggagattttcactccgctgtttgccatggctcgtattgtcggctggtgtgcgcaccgcaatgaagaactgaacttcgagggcaaacgcattatccgtccggcttataaaaatgttcttgatgatctggcttatatccccatcaagaaacgctgataagaacaaatccttttatgcaataataactaacctcagacgtacatctcggcaatccctgcatgtacgtctcggtaatccccagttgtacatcttggtagtacccggttgtacgtctggggtgacttgtttcaggaagaacgtccgatgttcatttaacatttaacactttgcggctgctgtatttttcatccgatggaggctaaggcatttatcgttggtagaaagggcacagcctggcaggtagaaacgcccttttaacgctacgttaaaagggcgtttctacaaccgatgaattatacattctatttctttggatatcagtgaactatgaactttccctttaccagaggagagattatggcaggtgacctgttgagaacgaacttgttattttaataattaccgttgattgaatctttgctgctattattgggataaggcataatgtctattaaatcaaaatacattaagcgtgtttttagatgcgttccggtttcaaagcctgtatattccacttcttgcgcttccgtagagaaaaggtatttgaaaccgtttttcagataatagttcagaggaatattttcattgtaagcgtcaacaattaaaaagcgacaccctgttttgtttcctgcatcaatgaaccatgatttaatgaaagtcatcagatcactgcctatgccctgatgcttgtattctttattgattccaagtctgccgattaatacacccggatagcggcgcatttgtttggcacggggaatggctttctgaactttcttttccctgctgttggggaggatgtttactctgatactatcgttagaaacagtgaaggcacatactatgtccgaaggctttttatctgaacgaaaacagtaactttttcctaatagttgtgcattatagagaggagcatcgttatgaaagaagtcgtctaagtcttggtgcccgcatgagaaagggtcacattctttaatcgtatactcatcaagtacggcaaaagtacatttctcaaaaagaaatcccatgttttataacattttagcctttttgagcacagcacgggcttccagcacatgtttgctgaagtcttgtttgttttgatttttataagccttgtccgctgccttaacgaagtgttccgcttcttttccttttaaggtcggtatggctttaatttccattgccattgctttttctttttatttagttcataaccaactgcaaagatagctgatttttaatgaataaacaaagaatgccggaagtctgttgtcatttgatttgttttttatttgagttatttttgtggccattcttttctttttttgttatttttgtgaatctcaaaagaaaatcaagatgagtataactgcctttaatctatttttgggcgtcatgagtctgatcgctctgattgttttcatcgccctctactttgtgaaagccggttacgggatatttcgcactgcctcctggggagtcgccatttccaacaagttggcgtggatactgatggaagcccccgtatttctggtcatgtgctggatgtggatgcactcggaacgtcgttttgatccggtcatactgacattctttatcttctttcagattcattattttcagcgcgccttcgtctttcccctgctactgaccggaaagagcaaaatgccgctggcaattatgtcgatgggaatcctgttcaatctattgaacggctatatgcagggcgaatggatattttatctctcacccgagggaatgtatcattccggctggttcacttccgcatggtttattgcgggcagtctgcttttctttgcaggtatgttgatgaactggcattcggactatatcatccgtcatttgcgcaaaccgggggatacccgtcattatctgccccaaaaagggatgtaccgctatgttacttccgccaattatctgggcgaaatcatcgaatgggcaggctgggcaatactgacctgttcactgtccggacttgtattcttctggtggacagtggccaatctcgtcccccgtgccaatgcaatctggcatcgctaccgtgaagaatttggctcggaagtaggcggacgcaaacgtgtatttccttttatctattgatttgaaataaattatctattgacataaaatagcgtactatggaatctaaacttttcacccctgtcactttcggtccattgacgctgcggaatcgtacgatccgctctgccgcttttgaaagcatgtgtcccggtaacgccccttcacaaatgctgctcgattaccaccgctcggtggctgcgggcggagtcgggatgacaactgtagcctatgcagccgtgacgcaaagcggactttctttcgaccgtcagttgtggctgcgtccggaaatcatttccggtttacgtgaagtgaccggagctatacacacggaaggtgcggcagcaggcatccagatagggcactgcggaaatatgtcccataaaaagatttgcggaaccactcccatttcggcctctaccggtttcaatctctattctcctacattcgtgcgtggcatgaagagagaagagttgccggagatggccagggcctacggacgggctgtccacttggcacgggaagccggcttcgacgccgtggaggtacatgccggacacggatatctgatcagccagttcctgtctccctacaccaatcaccggaaagacgaatacggcggctcgctcgaaaatcggatgcgctttatggaaatggtgatgaacgaggtgatgacagcagcgggaagcgatatggcggtctttgtaaaaatgaatatgcgcgatggcttcaaaggcggcatggaaaccgatgaaaccttgcaagtggccaaacgcctgctggcattgggcgcgcacgcattggtactgagcggaggcttcgtcagcaaggccccgatgtacgtcatgcggggagcgatgccgattcgttcgatggcttactacatggattgctggtggctgaaatacggggttcggatgtttggaaagtggatgattccgaccgttcctttccgggaagcctatttcctggaggatgcactgaaatttcgggcggcacttccggaagctccgttgatttatgtgggcggactggtgtcccgcgaaaagatagatgaagtattggatgccggcttcgatgccgtccagatggcacgtgcgttgctcaacgaaccggagtttgtcaaccggatgaggcgggaagagcaggcacgctgtaactgcgggcacagcaactactgcatcgggcgcatgtacactattgaaatggcctgccaccaacatttgaaagaaaagctgcctccctgcctgcaacgggagattgaaaaactggaaaagcaatgagtgaagagaaatgggcaatcatcaccggtgccgacggcggcatgggaacggaaataacccgtgccgtagccgaagccggttaccatattattatggcttgctatcgtccgtccaaagcggaaccgatacggcagcgtctagtgaacgagacaggaaacgcaaacctggaagtcatggcagtcgatctgtcttctatggcatcgacagcttcttttgccgatcggattgtggagcgtcatctccccgtttccctgctgatgaataacgctggaacgatggaaaccggacttcacatcaccgacgacggctttgaacgaacggtcagtgtgaactatttggggccgtacctgcttacccggaaactccttccggcattgacacgcggagcccgtattgtaaacatggtttcttgcacgtatgcgatcggacacctcgattttcccgatttcttccggcagggaagaaagggacgtttttggcgaatccctgtttacagcaatacaaaactggctttgatgctgtttacgatcgaactttcggaacgcctccgtgaaaaaggaatcactgtcaatgccgccgatcccggcattgtttctaccgacatcatcactatgcaccagtggtttgaccctctgacggatatctttttccgcccctttatccgcacgccgaagaaaggggcttccactgccgtcggcctcttgctggatgaggcagtggccggagtcagcggacagctttatgcaggcaatcgtaggaaagagttgtcggacaactacatttatcatgtgcagaaagaacagttgtgggaaataacggagcaattgctggcgcagtggttcacatgatttaatcatttgggtaatcgtacgtgcatctgatcgttattcatttgatgtagtgcaaatgatgaataagaaaaaacgtgaaaaaacgaccattctttcttctgccggagaaggagaaaaagaaatcacttggaattctgggatcaatccggaaaaaaggttgttgccgtttgttccttttatacggatttgagccaaatgttagtcaatagtatcttaaatggggtgactaaaaagtcggtagtatctccattggagatactactgtttgattcattcgtttcattcatttttcattcggatagagcaaaacaaggcgggcagactgcccggaatctgtggcatggatcatggaatggatgaattgaaataagaacggtgaacaattgaaaagctcaattcgtccaccgttctttatattgcctttataaaaataagcttctgttctgttggcagtctctattaaatagaaagctctttcaatacattgaccagatctctcttgaccggcttatcattcttgatagctttgctgaatggtacataaacgatttcatcgtgctcgatacctatcattacgttgcgctggtcttccatgatagcgtcgatggcagcggcacccaaacggcttgccagaatgcggtcgtgagctgtagggcttccaccgcgctgcaagtgtcctaagattgtcacacgcacatcgtattgcgggtattcgtttttcacacgttccgcatagtgcatggcaccgcctgtcagttcgctttccgctaccagtacaatactgctattcttggatttacggaatccgttcttgataaattcttccagttggtcgacttccgtgctgaactccggaataatggctgcttcggctcccgaagcaatggcgccgttcagagcaaggaatccggcatcacgccccatcacctctacaaagaacagacgttcgtgtgaagtggcggtgtcacggattttatctactgcatccagaatggtgttcaatgccgtatcgtatccgatagtggtgtctgtgccgtaaaggtcgttgtcaatcgttcccggaagtccgatacatggaacatcgaattcctgtgcgaagattcgggcgccagtcagcgaaccgtcaccaccgatgatcaccaaagcatcaatgccttctcttttcatattatcataagccagctggcggccttccggtgtggtgaactccttacagcgggctgttttcaggatggttccacccagttggatgatattacttacgttctggctcttgaactctttgatttcgcctgtcaccagacctttgtatcctctatatataccttttacttgtagtccgttgtagatagctgcacgtgttactgcgcggatggccgcattcattcccggagcatcacctcccgaagtcaaaataccgatacatttaactgttcccataacaatctttcattaattagtttgacgtggcaaatgtacaacaaaaagttgaaagcagtgtttcataagttttttttcgtgtgtcgaaaccattaaaaatattcaaattgtcttttctatctttctttttaatcttttatcaatagctggatatggtcatgtattttttccatcagccatttgggggtggaagtcgctccacatacgccgatggattccacattccggagtaaagtgggatcgatttctttctcattatcaatcagatgtgagttggcgtttactttcaggcattcttcaaaaagcatttttccgttcgaactcttctttccgctgacgaagaaaatcagatcatgcgttgccgcaaattccctaagattgggcatacggttagctacctgccggcagattgtatcgtaatattcgaaagtggcatccggtgaaatgtggagtttgatgtattctacaatctcctgaaactcgtccagagactttgtggtctgtgagaaaaggcggatgcttttagtgaaatccagctttttggcttcttctgcactttcgatgacaatggcttgaccaccggtctgccctaccagtcccagcacttctgcatggccgttcttgccgtagatcacaatttgcttttcttcaaaatcttccttccggaactcttgtttgatgcgcttttgaagccgcagtacgaccggacaggttgcgtcgatgatttcgatattattcttgtgggcgatctggtaagtctccggtggctctccgtgtgcgcgaagcaacactttggcattgcgcaattgtctgaactcatcacggttgatcgtaattagtcccattgccttcagcctttctacctcccggctgttgtgtacaatatctcccaggcaatagagggtttctccttttgccagttcttcttccgccttgtggatggctgtgaccacaccgaagcagaagccggaaccttcatctatctctactttaatcatacactcgatttctatcctctattcctttactacttttccgaactgttccgacagccattccttctgctgttcgatgctcagattagaattgtcgagcagcagagcgtcatctgctttgcgcaatggactcacttcacgatgctggtcgatgtaatcccgttgctttacgttctcaagaatttcttcgaagctgccttcctggccttttgcttttagttcgtcaaaacggcgttgggcacgaatctccggtgtggccgtaacaaatattttcagttccgcatccgggaaaaccgtggttccgatgtcccgtccgtccatcacaatccctttttctttacccatggcctgttgctgtgctaccatcgcttcgcgtacaaaatcgagtgcgctgatagggctgactttggacgaaacccccattgtacgaattttattctctacgttcaccccgttgaggtaggtgtccggacgtcctgtctccggatttgggcggaaagtaatccggatatcccggattgcttctttcagcttctccgtatcgataacgtctccgttaaatatcccattttcaatactatataaggtgactgcgcgatacattgccccactatctatataaatgtatcctacttcgcgggcgagatctttggccattgtactttttccgcaggaggaaaaaccgtcgattgcgattgttatctttttcatattatctgcttcttatatttgtccgccaaagatacgcttattttgaaaatcagccataaatttgactgtaaaagcaactgaatgagtatgaaagaattaaaaaagttaaaaagccggataaaaagatatgaagaaacggacggttatctgaaaatgtagtatatttgcccagagacacataggaagacactttttttattaatcattatattaacaaaattatggaagttaaaaaatcacccaaggcagacctggaaggaaagaaatccacatggctgctgatcggttacgtggtggtattggcttttatgttcgtggcgttcgaatggacccagcgtgacgtgaaaatcgatacaagccaggctgtagctgatgttgtttttgaagaggaaatcattcctattaccgaaacccctgaacaagcgactccaccaccacccgaggctccgaaggtggccgaattgctggaaattgtcgatgaccaggcagatattgaagaatcaactaccatccttaatgaggataacacacctaaagtggaagtaaaatacgtaccggtacaagtagttgaggaagagccggaagaacagactatcttcgaagttgtagaaaatatgccggacttcccgggtggacaggcagcattgatgcagtatctggctaaaaatatcaaatatccgactatcgcacaggaaaatggtactcaaggtcgtgttatcgtacagttcgttgttaacaaagacggtagtatcgtagatgcaaaagttgtacgcagtgtagacccgtatctggataaagaagctctccgtgtgatcaacacgatgccgaaatggaaaccaggtatgcagcgtggtaaaccggttcgcgttaaatttacagttcctgtaatgttcagattgcagtaatttgtaacactcatacatttaagaggctgcgaatgcagcctctttttattcattaatctttgttttcatcatgtttacagcttctcaattacttgataaaataaacaaccacctatctgaaaatcagataacccggactccggaaggactctacgaaccaatcgaatacatcctttctttgggggggaagcggattcgtcctgtattgatgctgatggcatataacttgtataaggaagatgtttcgtcaatttacgatcctgctaccggtatcgaagtttatcataatcatacattgctgcatgatgatttgatggatcgttcggatatgcgcagaggaaagccgactgtgcataaggtttggaacgataacacagctattttgtcgggtgataccatgctgatactggctttccggtatgtagccggttgtgcgcccgagcatttgaaagaagtcattgatttgtttagtctgactgcgttggaaatttgtgaagggcagcagttggatatggaatttgagtcgcgcaacgatgtggcggaagacgaatatattgaaatgattcgtctgaaaacggctgtattgcttgccgcaagtctgaagatcggcgcgattctggcaggagcgtctgctgttgatgcggagaatctttataattttggtatgcagataggggttgcattccagttacaggatgatttgctggatgtttatggcgatccggaagtgttcggaaagaaaatcggtggagacatcctttgcaataagaagacatatatgctgatcaaagcactggaacgtgcaaacggagaacagctggaagaactgaaccgctggctgaatgcagagaactgtcagccggcagaaaagatagcggcagtgacggagatctataatcagttgactatccgtagcgtttgtgaaaacaaaatgcgcgaatattatacgctggctatggagagccttgaagcagttgcggttgccgaagagaagaagaaagaacttaagaatttagtgaaattactgatgtatcgggaaatgtagtaaagttggtgggaaatgccttacagacgattgccaaatacggatcaagccagagtacgggcgctgaaagcagcggtcgagaagggtgacgtgtataatgtgcgggacttggctatctcactgaaaacattatttgaagcccgtaattttctgctgaagtttgaagctgcgcagatttactatacccaatgttatgacaaccagtcgagagccagtcgcaagcatcaggcgaatgtgcggatggcacggctgtatatatcccattttattcaagtgctcaacctcgcggtgcttcgcgatgaaatcaaaccggtgcataaagaactttatgatcttccggaagcgaatgtggtaccggatttattaagtgaagcagctttggtagagtgggggagaaaaatcattgaaggagagcagcggagaacctctcaagggggaatccccatttataacccgactattgcgcgcgtaaaagtgcattatgatatttttctggatagctacgaacgtcagaaaaattaccagtctgccaccaaccggagtctggatgaactggcttcgatgcgtgaccgggcggatgaattgattctggatatctggaatcaggtggaagcgaagtttcaggaagtgaatcctaatgaagcccggttggcaaaatgtcgtgactatggactggtatattactaccgttccaacgaaaaagtaaaagaagaaagcaaattgtcatgttaatagatactcattcccatctttttttggaagaattttccgatgacctgccacaggtgatggaacgtgcacgtcaggcaggtgtttcgcgtatttacatgcccaatattgacagtacgacgattgaatccatgctgtcggtttgtgcggattatcctgatttctgttatccgatgatcggattgcatcctacctcggtgaacgagtcataccggcaggaactgtcaattgtccgggagcgtctggaagcacccaataattttgtagccattggcgaaattgggcttgatttgtattgggataaaacctttctgaacgaacaactgtacgtttttgagaaacagatagaatgggcgctcgaatataaattgcccatcgtgattcattcgcgggaggcattcgactatatatataaggtaatggagccctataaaaacacagctttgaccggtatttttcatagtttcaccggaaatgccgaagaagcggcccggttgcttgaatttggcggtttcatgttgggaatcaacggagtggtcacatttaaaaagtcctcactgccggataccttgctgacagtgcctttggagcggattgtgctcgaaacggactcaccgtatctgaccccggcccccaatcgggggaagaggaatgaaagtgcgaatgtgcatgatacgttcctgaaactggtagaaatttatcggaccaccccggagcacctttcacaagccacttccgaaaatgcgctaaaagtgttcggaatggtcaaataaggttccaaaggttttaaattatattaatttgcagtatttatttaagataaaaaagggataatgctttaggaaaagaaaaaaaaggatacatttgtagctgaaaatgcggaaaactcataaggagaggtgctcgagtggttgaagaggcacgcctggaaagcgtgtatacgccaaaagtgtatccggggttcgaatccccgtctctccgcagaacaaaagttgaaacgtgaagtaaatacaataaataataatcaattaattaatcttaaaaattagacacacaatgaaaaagttatttgcaattgttgctgtgattggggcctttacatttggctcaattcaacttgctcaggctcaagacgctcctgcagcagaacaaactgaacaacaagctgctcctgctgctgctcaagctgctccggccgctgctcctgctgcagaagaaggtggtattcacaaagaaatcaaagttaaattcattgaaggtactgcatctttcatgagtttggttgctattgctttggtaatcggtttggctttctgtatcgaacgtatcatctatttgagcttggctgaaatcaacacaaaaaaattcatggcatctatcgaagctgctttggaaaaaggtgatgttgaagctgctaaagacatcgcacgtaacaccagaggtcctgttgcttctatctactaccagggtttgatgagaatcgaccaaggtatcgatgtagttgagaagtcagtagtatcttacggtggtgtacaggctggttaccttgaaaaaggatgttcttggatcacactgtttatcgctatggctccgtcactcggattcttgggtactgtaatcggtatggtgcaggcatttgataagatccagcaggtaggtgatatctctccgacggttgttgcaggtggtatgaaagttgccttgattacaactattttcggtttgatcgttgctttgattcttcaggtattctacaactacgtacttgctaagattgaagctcttacaagcgaaatggaagactcttctatctctttgcttgacatggtaatcaaatatgatctgaaatacaaaaaataattcgaaatgagtaagttatcatataaagtatcgtattacgcactgtatgcgatgtttgccatcatcctcattgtcctggggcttttctacctgggtggtgatgctcaaggagcagatgtcattgcgggagtagatcctgaaatgtggcaaccggcaaacacaaatgccttactgatgctcatttatgggttatttggtttggctgttgctgctacagtagttgctgctgtattccaatttggagcagctttgaaagatagccctgcaaatgcaattaagtcattgcttggtttggttcttttggttgttgttttagtgattgcttgggctgctggtgatggaacaccgatgaatatcccaggttatgacggtactgacaacgttcctttctggctgaaattaactgatatgttcctttattccatctacatcctgttgtttgtaacaatcgttgcaatcatcgcaagtggcataaagaaaaaaatatcataatcaattgaggatactcaatttaataagtaattacaatggcaagaggaaaaagaaaagttcctgatattaactcaagttctacggcggatatcgctttcttgttgctgatcttctttttgattacaacatcaatggatacggaccgtggtttggcaagacttttgcctccaccacccgaagatcaagatcaacagaatacggataagatcaaagaacgtaacattttgcaggtatacctgaataaggatgatgctttgatgtgcggtaatgattatatcggtgttgagcaactaagggaaaaagctaaagaatttattgctaatgccggcaatgcagagcacatgcctgaaaagacacagaagaatgtggagtttttcggtacgactctcgttaacgacaagcatgtaatttctttgcagaatgaccgtggatcttcttatcaggcatatatcagcgtgcagaacgaacttgttgctgcatacaatgaattgagagatgaactggcccttcagaaatggcaaagaccttatgcggaattgaacgacgaacagcaaaaagcaattcgtgaaatctatccgcagagaatttctgaggcagaacctaaaaaatacggagaaaaaaggaagtaagtaatgggaaaatttaataaaactggtaaacgtgaaatgccggcattgaatacttcttcgttgcctgaccttatctttactttgttgttcttctttatgattgtaacaacaatgcgcgaggtaacattaaaggtacagtttacacttccggtaggtactgaactcgaaaaactggagaagaaatcgctggtaacattcatttatgtgggtgaaccgactcaggaatatcgtgcgaaaatgggtactgaaagtcgtattcagctcaacgacagctatgctgaagttggcgaagtacaagacttcattttccaggaacgtgcaagtatgaatgagggtgaccaagctaagatgactgtgtctctgaaagtagaccaaaagactaaaatgggtattatcacagacgtgaagaatgcccttagaaaatcttacgctttgaagattaactattcttctactaaacgtggtgagaaataattagttaatttgatatatagagaagggcgtccaagcaattggacgccctttctttttagcttcttttttagcctctctgtttattattctccggcagaggcagactttatgtctgaacttcgtctgccgtatatgatctaaaatctatctgaagtatgttttttacgattcttttgtatctttattccttgactccgtaaacgattgtatggagtttatgtcttatcccttcataatccttttctgcatccaggttgccgtgtaccatgagatacataggcaggaaatcgtctccttctttatacggcggctggtaatagtctttttcccacagtgtaaatccgtgccgttggtaaaagttgatacggcgtttggccatttcctctaccggacgttctacttccaatacaatggggcgtttcaggaactcacataaatgctctaatgtgcgttttccgtagcctccgttgcgcaatgccggattggtagcgaagtgttctacgtaatagaatccgtcgaaatcccaatatgtaataaagccaatgggcaggtcatcgtcaaaaatgatattattatggaagttgcctatccggtctgtatattcacgaagatgttccagttcgcgatattcttcaggtggaaacgattcgacgagaagctcttccataaatttgtaatgttgtacgtccgatgtggtgatcggttgaaatctgatcatacggtttgggttttaagtttgacaatattgtttttgttgttgtaccggatattactataccaaatgttatatcaaatgtgtatacttttatcgggtgaatatatcagttatatgatactatgagatgttactgcctttagttaaggtacatagaactcaataatccgctggatagcacgctggcataccgggcagaactcaggatattcgtttgttttcatgcgacaattgaatgccggccgataaatacctttggctgagtaaccgccgccttcatatacacctaccggatagttttgatgttgtgctacaggtgtggggacaggcgtattcggtgcaagcatatcttcccatttcgaggcaaaatttactcgtgtactgatgttctgttcccacggctctacatccagcggatacgtgtccgtcattacatcgtcatcataaaaatactcatccgccaagcctccgaagctatgtccgaattcatggaccactacaggcttgaacatcggatgatgagcggtagtcagcgtatatgagttgtaaattcctccgcctccgtacacatccgtattggcaaggataataatatgctcataaggaatgccggccaaagcgttgtggatggccttcacccgacttgtagtcaggtaacggtccgagtaaaaagtatcgaaatgagaatgaacggccgtatgtttccattgattttcgcggggaacactgactccgctgtcaatcgacggactggctacagccactacgttgaacttatttttcatcgactggaacggttcgtgtgaaaacaggctttcgcaggctttctgtgcatcctgatagaataagtccatttccttttccgtgtagccttctgccaggatagcgacatctatgcactctttttcgttaccgctctgaagtatataccggtgtggagtgacgtgtgatgttccccgtttatgaatcaagatatcgtccggacggacaatatgcttaaaactggtcatcacttccttgcggggagagaacagtacgatttctacctctgccggctgtttggggtagggaagcaagaatgtattttcgaaccctttggctgtctccttggcttcatcggtggacagccactcctgaaacagagaagaaaaggaagtcttgtagatacattgtcgcgtggcgagatctcggacgatgatctgcccattgccttcgagtggaagttcggacaaatgatgttcacgacctgcccaggagggaagctgagatagctcgtccagatagatcgcttgctgcttattgtttccggtgaagatataatccacccgtaacgtcttattctgaaaataatctgcaaagttttgcgcataacttcctgccgaaatcaggaaaaaaagaagaatactgcaaatttgtttcatataaatagtatatttatgttttttacaaaggtacaaactattgttgacttattcgatatttgcaaataaaagtaataaatcatagtatttgttgccgaaaaatagctaactttgcatgaaagattcattgattaaaacaatttgattcaaaaatgggacatcatcaattagatgctttagatgagcaaattctgaaattaatagcagggaacgcgcgtattccttttttggaagtagcaagagcgtgtaacgtttccggggcggctatccaccagcgcattcagaagttgactaatctgggaatattgaaaggatcggaatatgtgatcgatcctgagaagataggatatgaaacttgtgcttatattggtatatatctgaaagatccggaatcctttgattcggtaacaagagctttggaagctattccggaagtagtagaatgtcatttcactactggtaaatatgatatgtttatcaagatttacgctaagaacaatcaccatttgctgagtatcatacatgataaattgcaacctctggggttggcgcgtacggagacattgatctctttccatgaagccataaagcggcagatgccgattatggtcgacattgaagacgaagattaatcgtacagaataaaatagcttactgtttcacgtaatctacaaaagcatacgggcagagatgtttctcatccacaggatgagcttctctgcttttttcgtgccattgagccggagatacttccggaaagaaggcgtcggcttcaggagcaacgtcgtttatttccgtcagacaaagttcgtcggcaagaggaagtgcctgtcggtagacgcttgcgccacctattatatagacgtgctcatcttccttgcagctttgcagggcgacttccagcgacgggaagacttccgcaccgggacataccgtatccggacgggtggataatacaacgtttctgcgattgggcagcgcacctttcggcagcgattcgaaggtttttcttcccattatgatggtgtttccggtagtcaatgccttgaagcgtttcaagtcgttgggcaaccagaaaagcagtttattctgaaagccgatcgccattcggcggtctacggcggcaataattgatattttactcatggttttataccgctactattccggcaatatgtggatgcgggtcgtagttcaccagttcgaagtcttcgaactggaagtcatagatactcttcacatccggattaattttcatttgaggcaatgcgcgtggttcgcggctaagctgcaatttgacttgatccaagtggttcagatagatatgggcatcgccaagtgtatggataaattcacccgctttcagtcctgtcacctgcgccatcatttgtagcagcagtgcatacgatgcgatattgaacgggactccgagaaatatatccgcgctgcgctggtaaagttgcaggctcagccggccgtctgccacgtaaaactggaagaaggcatggcagggaggcagattcatattctttaagtcggctacattccaggcgctgacaatgatacgtcgggagtcgggattgtgcttgatcgtctctaccgcttcgctgatctggtcgatgaatccgccgtcgtagtcgggccacgaacgccactgatagccatagatatgacctaaatcaccgttttcgtccgcccattcgttccagatgcgtacaccgtgttcttgcagatatttcgcgttcgtatcaccttgcagaaaccagagtaactcgtagatgattgatttcagatgcagttttttggtggtcagacacgggaaaccctcgtcgaggttgaaacgcatctgatgcccgaacacactgatcgttccggttcctgtacggtcacttttctcagttccttcagttaatacgcgattgagtaaatctaaatattgtttcatagcgaataattttccaataagttggtgcgatgcaaaattacaaaaatggcgtgaataaattggcaaaccatccgacgaacttcttccacggtgagcgctttttccagaattccggtgtcagctgcgtacagtgctctatatcgttctgaaacatttcgttcagttcgcctgtaatttccttgttgaagatgaaagcgttcgtctcgtagtcgtatcggaggctgcggctgttcaggtttgcggtgcctaccgtgcagaaaatatcgtcgaccatcatgattttggaatgatggaaaccgccattgtacatatagacggtggccccccttttcatcagtttgtgaagtttgtagagggcggcgtccggagtaaacggaatatcggaggcggaagaaaccataatcgtgacatccacacctcgttcgatggtgcgttgaagcgccttgttgatggaggatgtgggcacaaaatacgggttgacgatgtgcacgtttttctgtgccgaatagatcgacatggcataagcatggctgagcatacggctgtttttcttcggtgtgcggtctacgatggcgacgactacattggtgctgtccgactgctccttgtgcttggggaagtatgcttcgccgccaatgttttgtttagtctccttgttccatatggtaagaaatatttcttgcaggtcattgacggcatcgccttctattctcatgtgcatatcacgccatgtgccgattttggggagtccgttgatgtagtagtcggcgatgttcattcctcccgtataggcgacttcgccgtcgatgacggctattttgcggtgatcacggtgtgccgcatgattgatgtagggaaaggtgaacgggtcgaacttgacaatctcgattccctgctcccgtatttttttgagatgtctcttcttgagcggtttattgttcgaccagttgccgaacgcatcaaacatggcccgtacttccacgccttctttcaccttttcggccagcagatcgaaaagcgcattggctatagagtcattgcggaaattgaagtattccagatgaatgtggtgtttggcgtcgcggatggcgctgaataaatcaatgaatttttctcgtccgcttttcagtaacctgaccttgttattgtcggatataggaatccctgactccgataagaaacgtaatacaagggagtcacttgtcagagctatggagtctctggaatgcgtcatcaaactgtcgatgacatctgcctgagcacggaataaagacagaaacagaaataaaagaaatatacgtagtttcaaaactcttctcgctattttagtttacaaagtaacaaagatacaacatctatgtttggagctatcgggagaggagggctaatttattatactttaacagaagtttcgcaagttctttatattattgacaaacaatagtatctcaattctcctcctcccgggagctaccctttatacacatctattttttttaagaaatagatgtataaagagttaaattaattaaggctattcatgataagcatagtcattatttaatcttttttttcctaataacacctttaaatattccaatttgtaaggatttaaagatgtgtataaagggtagctcccgggaggaggggaattaagatagtttggataacgcaaaggtaacctgcgaaacttgaatactttaacagaagaaatgaacaagaatctcttgatctggggaattatattcgttcgatacatctgatctgctgtgttccctgccgttgtcacacttgtgccaacggcttgtcactgctgtgccagtgcggtgtcacaactgtgccaagtccttggcacagagtgtgacaagcattgttatgccattgatactactttccgtccggccatgaacagtaggacgaccgttgcaatgatgattgatttcggatcgaggctggttgcgccgtggttgatcatgccgatgagtacatctttcagtgtttcccatacggcttccagtccgcccagggtgacgaagagcgtggctcctactgccattacgaatacagtccagaggcgtgccaaccggttactgcggttgggcaagtggtgcatgacgcggcggctgaatccgttgtcggctatttcccgcttgttttctgcgaagaaatctttcagaagtttatcattatctatttccgtcataaccgtttctttttaaatacgttgctaatttttcttttccacgcgacaggtggcttttcaccgttcctgccggtattcccgttattcctgcaatcttgtcgatgcttacatcttccatgtaaaacaacgtgatgcaggttcgttccacttccttcagcgatttgagtgactgataaacatccattgtctgccctatgttcgcttgttcggtgcagttgacggcgtctacttccctggtatccaggtctgccatctccttccggctgcgaatataatcataaaaaatattataagcaatacggtatagccatgtggagaaactcgacaagttacggaacgaggccagattggtatatgccttgatgaatgtatcctgtgccaagtcgtcactcaattcgctgtcaccgcaagtcagatgcaggaagaagcgtctgacaggcgactggtatttttgtaccaactggtcgaaggccctggtgttcttgaacaccacgacctgtgcgactagcgatatatcgttgagttggctcatctattttcttcgttcttctcttcgtcgttcttctccgagatgatgatgtcgttgcttctgatggcggtttctctgttcttggtttcctcgttggcatgttgcttgtagccgatcagccattgtcccagtcccataaacatgacgagcagtccgatagcgccaattccgaattcaccggtgatggcccagaggaatatgaagagcccgatgcctgtaaaggtatttttgattccttgtgtacgttggtctgtcgatttgttctcccgtatgaattcttccggaagaggctggccggctgcgagagcctgttcggcaagacggtagcgtgctttccggttcttgtagcggaagaagaagactacaaatatgatgaataccggcattccgaatatggcaatgatgctgatgatggctaccagaatacctcctccgactgcatctccgaaattattgaacgggaagtcatcgtcgtcagagctgatggtgaagctcgcttttccgtgagggccgcgcgaggagctactcactttgcccgtatctacacttgtcgtgtcggcgtcttcgtcatcgatgccgatcacagtgacggccgtgttgccgacattaaccttggcatccttgcctttccctttcgttacggtcacttttacgtttccggtagagtcgttcacaatagtcgtttgtttctgggcgtttgccagagagaaaatggtcatcatgaccagtaaagcaattaaaatccgtttcatatattaattcttttatttgtttctttgtctgttagacgtagttcgtatgtcagaaagttgcaaagagacgaaatatttttgatatttgcaggaattaataaatgaaaaatgaatttacccgcttcttttatcgactatacccgtgccttactgggcaatgaagaatatgaaaaactggctgccgccttgcaacaggagcctcccgtcagcattcggatcaataaattgagaatgaaggaggaaggagtaagctcgctgacagacagttctgcccgtttttccttcaacaaagttccctgggcatccgatggctactatcttgacgagcgtctgacttttacgttcgacccgttgtttcatgccggttgctactatgttcaggaggcttcgtccatgtttgtggagcaggtgctgcggcagtatgtcgagtctccggtggtgatgctcgatctttgtgcggcgcccggaggaaaatcaacccatgcgcgcagcgtgcttccggaagggagtctgctggtggcgaatgaagtgatccggaaccgttcacaggtgctggcggagaatctgacgaagtgggggcatccggatgtggtggttaccaacaatgatccggctgatttctcggcacttccgtctttcttcgatgttattctgaccgatgtgccttgttcgggcgagggaatgtttcgtaaagatcccgtggctgtggaggaatggagtccggagaatgtagagatctgctggcagcgtcagcggcggattattgcggatatttggccctgtctgaaaccgggcggcatattaatatatagtacgtgtacctataatagcaaagaagatgaagagaacgtctgctggattcagcaggaattcggtgcggagctcttgccgctggaggtgcaggacgagtggaatataacggggaatttactcgatggagaggatgaatctcagagaagtttgtctgtctgtcattttcttcctcataagacaaaaggcgaaggattctttctggcggcacttcgcaaaccggatgcggaagatgaaccggcaacctattcattctcaaaagcaaagtcgtccaagaaaaaagataagaaaggcggagcggctgcttctcccgtttccaaagaacacatggggatggcactgaactggctgaagctggaaaatgccgaaaaatacaccttgtctgcggaaggcgcgggcatcgtcgcatttccgcaacgatataccgatgaactggctgccatgaaacagcatctgaaagtgatacaggcaggcgttctgactggtgaagtgaaagggagagatttgactcccgctcatgcgctggcgatgagcgctacgctcttgcggcaggatgcttttgataccgaagaggtgagttatgaacaggctatcgcttatttacgaaaagaagctattaccttgccggaaacagcccctcgtggttatatcttgcttacttaccggaatattcctctcggatttgttaagaatatcggaaatcgtgccaataatctttatccgcaggagtggcgtatccgtagcgggtatttgccggaggagatacgtacgctgtaaagatcattcctgaaagaaacggagaaaggatagaatgcttagcttgatagcgcggctaatttatcatccataatttagggaagtattcccgtggggatttccttataattcagaatgaaaccgacctgtctgcctgttcccggttctgctccttccgttatttcttccagtgtgtaggccggaggcggggcaggtgatgtccgtgtttctccaatgggcggcgtgccccagttcagatgtaagttcttgtccagtcgatgaagcaggtacgtgtttccccatacggtgaaatggtgttccgtagccggtgaggcatccaatgaaaaggtaagagtcagcgtggctttgttgtcttctccttgtttcagtgcataagttcctttggtgatcagttcgagtcccgatgaaaaagcggttcgttgtccttgtttgaagaaataagcgtcacgggcagcgttgctgacaaggaaaatgtcgtcaacacccggcagtaggttttcgtccccattgggacgcagggatgacgagccgtgtatcagattgagatcttcgtagtagtccaccactttaatgggcagagtgagcgtttcctgtgtggcgttgtctgtcactttcagatacgtgcttccggtgagaattccggatatgtaaatcattcgtccggcgggaactccgctccagccgctttcgactccggcacttgcgatgcggggatttccgatttccagagagtagtctccgtttccactttcgattccgaggtagcgtcttcctcccatgggcacttcgtatttgctgtcgtaaaaccgcaggggggcatcggcatcgtctttacaggcactccataaaataagaatgcaaaacaagatgggggtgtaagagagggttttagttttcataatagtttagtgtttttttacagtccccaaatgtaatgcattctttttatttattcaagtttcgcaggttacttttgcgttatccaaactatcttaattcccctccctcccgggaggaggggtgcccgtagggcggggtggtaggtgagaaaagcattcattcgtattctattataggtatttttatgtttcacctaccaccaccccctacgggtactcctccttcccgaaggaggagaatggagatagaatcgactttttagtcacccccatttgggatactattgtttgtcaataatataaagaacttgcgaaacctcagttatttattcaataatcgggcgaaataaagcggaatttatagcttgctcttataaattcgtgccattgccttctgatattgattctccagctggaggtaattctgatgactttgataaatgacggatacctcgacaaaatactcgatcatgctgatctgtccgcctgtcagagcctgtttcagcagtgcgaggtcttgttgcgcctgaaaagttttcctgtattcctccatagaggtgtgcagcgttttggcttcccgatagagctgtgccagttcggattccacttgcagggtggcgttgtctttctgcaagtcgatgttcagcgcttgcgctttggctattttcaccttgttgcgattctcgaaaagcgggaaggagaatcccactactactccgttgaaaggcgttcccgtttcggtgttccggcggtagccgagttccagtttcggtagccattgcgacttgttgacggcgatctgcttgcgggcaacgaggctttcgttgttgaacgccattaacgtgcggtcggcggagagcacttccgatttcagtatctgatagtcggcagggaaaggcgtcgcaggatacgtgttttcttcgaacactacggggatattgccgtttaacgtgttcagttcctgcaacttattgcgcagtgccgtttcgttcagcgaagtttccgtcttgacattcagcagttccagattgattttattcgtttcgagagcgttcgcatctccggtttggaggcgcttggcgtacattttggcaagttcttctgcgttgcgcagccgttcctccaagatgtgtttttgctggcgcagcatgataatgtccagacacacttctttggcgagcaacaatttctcttggcggaagacgtccgcctgactgtcaaaagcacccgctttcagacgattcagcttgttgcgggtggcatacaggctcggaaagtcgaaactttgcgacaccacaagttcgccgatcgtttcgtttttatctttcgctccccaaaggtgggcgtatgataatgtcgggtccggcaggttattgtccgttttggcttccagcttttgcgaggtgatgagttgggcgtttgcctgcaactccttattgttggcttcgatattcttcaaaacctgttcgatgccgctttgggcctgcacttcgcccgtgagggcgagaagtgcgcagcttaccaaagagcctatgatgatgattcgtttcatactttttttatttgtttctatatacatagtagctatatttaactgataattatgcttgttccgccggtacgccgcatggagaatttgccccagcgctacgctggcggtgcatcatcagataaacaatcggaacgatgaaaccgttcaggaaagtagatgttaaaagtccgcccaaaatcactttggccatcgggctttgaatctcgttgcccggcagatcaccgcccagagccagcggtatcagtgccagcgcagaggagagagccgtcatcaggatcggattcagacggtcgagagagccttgtaccacgctgtcgtatacgttcagtccctccacttgctgcaagtggttgtagtggctgatgagcagcataccgttgcgggtcgcgataccgaacagcgagatgaaaccgataattgccggaatgcttacttcgccggttgtgatgacaagcgcaaaaacgccgccgatcaatgccagaggcaggttcagcaagatcacgccggactccttgacgctgcggaactcgtggtaaagcaacaggaaaataatgacgatactcatgaaagatgtcagcgccaatacacggctggcagcctgttcgctttcgaactgtccgccatactcgatgtggtagccttcgggcaactggatagtggcgtctacctgcttctgaatatcatttacaacactgcgcaggtcacggttggcaacgttggcggagataacgattttccgttttacattttcgcggttgatcgtgttcggtcccatggaggaaaccacttccgccacgtagttcagaggaactttgcgtccatcgttggtgtcgaccatgaggttgcggattttctccatttcgtcgcgtgcgtcgtccttcactttgacgatgaggtcgaagctcttgccctgctcgtacacttgcgaaatcacttttcctgccagcgccacattcacgtattcagaaaactccggcagggtgatgccgaatttcgccagcatttcccgtttgggctgtatcttcagctgcgggcgttcgatttgttgttccacgttgaggtcggcaattcccggaatgtcgctgatagctcccttgatctggttgcccagcgagaacatcttgtttaggtcgtctccgaagagtttgatggcgatatttgccttcgtaccggacaacatcgcgtcgatacggtggctgatgggctgaccgatttcgatgtttgctccggtgatcgttccgagtttctcgcgcacttcggcgacgagttcgctgcgcgggcggtctttcagttcaaacggtgcctcgatttccgaaacgtttacgccgagcgcgtgttcatccagttcggcacgtcccgttttgcgggctacggtttgtatttcggggattgtcagcagcaattcttcggcacggtgtcccatcttgttgctttcttccagagatatgcccggcagcgaactgatattgatggtgaacgagccttcattgaacgaaggaaggaagctgcgcccgagcgtaaagaatacccctagggcgatcaggaaaaggacgatggtgctgccgagtgtcacccgtttgtgagccagcacccatgtcagcgccttttcgtaaatgcctttcatccagcgggctacgaaagattctttcagttccttgttcgtcttgttgctgcccagcaggtaagagcagagcaccggagtcagcgtgagggcaacgaccgtggaagcgaacagcgccacgatgaaagcgatacccagcggtaccagcatacgtccttccattccactcaggaagaacagcggcacaaagctgacgacaatgatcagcgttgaattaagaatcggcattcgcacttccttcgaagcgttgaataccacttcgagcgtgctgaggcgttcggcttccgctttcagacggttctcccgcagtcgcttgtatacattttccacgtcgacgatggcatcgtcgaccagcgaaccgatggcaatcgccatacctcccagactcatcgtgttgatagtcagccccatgtagtgaagcgtgaggatggagacgagtagtgaaagcggcagcgtgacaagggaaatcagcgtagtgcgtacattggccaaaaacaggaaaagtacgatgacgacaaagattcctccttcaaaaagagactttttcacgttgccgatagagctttcgataaagcggctctggcggaaaatatccgtggagactttgacgtccgcaggcaaattcttctgtaagtcttgcagagaggcctccaatttgtccgtcagttccagcgtgctggtggcgggctgtttggtgacggtcatgagtacggccggtttgccacgctccgaggctgtgcccagtttcggggctttgggacctattttcacgtcggcgatgtcttccagcgtcaccggaaagttgttcaccgttttcactaccgctttgccgagttcttccactttgggggtagagagtactccgcgcacgatatattcattgccaaattcgtaaagtacgccgccgttggcgttcaggttcatgtcttgggtgacggccatcacttctcccatcgatacgccgtagtggcgcatccgttcggggtccaactgaatctgatattccttgatgtctcctccgagcactgccacctgtgccacgcctccggtggagagcaggcgcgggcggatcgtccagtcggcaatcgtccgcagatcgagcatggaggtggagtcggcggtcagaccgacgatgagcatttcgcccaagatggacgattgggggccgagagtcggcttgcccacgttgacgggaagtgactcgctgactacggcgagcttttcgctgacgatctgacgggcgaggtatatatctgtgccccagtcgaattctacccagacaacggagaaaccgttggtcgaagaagaacggacacggcgcacgccggtagctccgtttacggctgtttcgacggggaaggtgacgagctgttccacttcctcggctgccataccgttggcttcggtcatgatgaccactgtcggggcgttcaggtcgggaaacacgtctacttccgtgtgcatggcggtgtaagtccccgcgataagcaggaggatggccgcgcagagcacaaccagtcggttgtgcagggagtaatgtatgattttatttagcatgatatttcattgattaagtctggttcctcccggtttacttttgagaagtgccggacaggggataaacttgcgtaactataaatgagttctgtgtgtgccgcaagggaacttggatgcggcgctttgccgctagtgctcatgactgtgggcagggatggcgttgcttgcgcttgccaggcgaacttggtatgcgccttcggtcactacacggtttccgggtttgattccggtcaggatttgtacacttttgccattgtcggcgccgagggtcacttcctgtttcttgtagccttcttcatcgagttgcaggtagacgaagaagatgccttgctcttccgtcagggcggtgcggggcacggatatcacgttttccagttgggaggaaagcagataaacttcgacgaatgatcccggaatcacttctcctttattgtcaaattcgaaggtgacgggcacgtagaaagagttgtctccggaagttttcccgaaggaaagcagtctgccgctcagttcattcagttcgtagacctcattattataaggtgtccggaaattggcggaactgattgtgcggagatacgggtagtatttttccgatacttcggcacggaggaaaagccggcggttctgcgtcacgctgaccagtggctgaccgatggttacgtagtctccctcattgaccagaatacttttcacgtatccggcaatgggcgcggtgatattctgaccgatggccgagtggtttttggcgagcgcttcgtagctgatacgtgcgttttcgtagttctgctccgcctgtgcgaaatccttgtcggacacaatcttgtttttgacgagcgacttcattcgttcgtattcctttttggatacttcgtaagcgattcgggcacgttgtacggggtcaccgtcggcgatgttgtgcgaagaaatagtcaccagcggagtgccgcgaccgacgctcattccttccgtcaccttgccgcggaaagaaacgactccggccaccgtggctacagccaccgattcgtcgccttgggcagcgagtacctgtccgcttgtcttgatgacttgctggaagggggccggtgtgatagcatttacctttacaccggcagcgttagctttcgctttcgggaggatgatttcatcgctgtgctcgccggcgggttcgctggtggcagctttgccgtgatcgtgtcctccgctgcattcaccttcgtgtgaatggtcggctccttcggcttcgtggtcatgaccttccgcttcgtggtcatgtccttcgtgttcatcatgattgtgtgtgacggtctcgtggtcatgcccttcatgaccagtatttttactattgcaagagcccaggacgaataatcctatgactcctataaagataagtttcttcataaatgttgttttcctactaagttttactgtttttgtacgctacaaagatagagtaacgcagatgcaacttgcttgcatttacgttattacgcaaaaacagagtagggaggggcccgaagtgaggaggtacgaggtattttcgtaccgtgcagggattcacgatagatgtagtaatttttgactcgtctttcctgcggtcgtaataaatgttcgatgatcgtatccgtaaacagggtggcgacgaatacgtaattcggtccgctgtccgtgtgcacggaggggatgggggagtggaagcgggtcatgcattcgctgctgcaacatgaatcgcttgcggggtgatgatggtggttggggcattgctgctctaccgattggtcctgcttcatgcagatcatcccgttggggtggtggtgatggggaataacggcggctaccaacataatgatgttgataaagaatagcatcgttactatgaatcgtttcttccctttcatcctttattgcagaacctaagtctattattaaatttgcacaaatatacaaatactttttctttcacctaaagcagataatgtctttttattgtttattatttcttttccagttcctgcaacgaatccatcttcttcttttcgaggaattcgtagatgccgcaaagatgctccgtcaccttcttattgccgaattcgtagacctttgtcaccagtccgtcaaggaagtcacggtcgtgcgaaacgacgatcagggtgccgtcgaaatccatcagcgcttgcttgaggatatctttggttttcatgtcgaggtggttggtcggctcgtccagaatcaggaggttgaccggttccagcaggagcttgatcattgccaggcgggtacgttcgccacccgaaagcactttcactttcttcatagattcttccggcccgccgaacatgaaggcgcccagcaagtcacgtatcttgttgcggatttctccttttgccacgtcgtcaatcgtctggaaaaccgtgaggttttcgtccatcagcgaggcttgattctgcgcgaaatatccgatttgtacgttatgtcccagcgtcagcgtgccgtcgtggtcgatttcgttcatgatacatttcaccagtgtcgatttaccttcaccgttcttgcctacgaaagccaccttgtcgccacgttcaatcgtcaggttggcgttgcggaatacgacatggtcgccgtacgtcttcccgacgccttccatcgtgacgggataactgcccgaacggggcgaaggcgggaatttcagccgcagtgccgaagtatcttcctcgtctacttccagcaattccagcttttccagcatcttgacacggctctgcacttgcaaagtcttcgaatacgtccccttgaaacgttcgatgaaggcttccgtctcggcgatgaacttctgttgctcgtcataagccttctgttgctgttcgcggcgttccttgcgcagttgcaggtattgggagtagtttactttatagtcgtagatgcggcccatcgttacttcaatggtgcgggtggtgatgttgtccacgaatttgcgatcatggctgatcacgatgaccgctttgccgttattgatcagaaaatcttccagccattggatcgattcgatgtcgaggtggttggtcggctcgtcaagcaggagtacgtccggtttttgcagcagcagtttggcgagctcgatgcgcatgcgccagcctccgctgaagtcgctcgtctgacgttgaaaatcttcgcgtgtgaatccaagtccgagtaatgatttctctacgtcctcttcgtaattggttgcgtcgatggagtaaaatttttcgctgagggcggacacttcctcgatcagtgccatgtagctgtcactttcgtaatccgtccgtgtttccagctccttgttcagtgcgtctatccgtgcttccatctcatgcagatgcgcgaaagcctgtgccgtttcggcaaacacggttctgccgtcttctgtcatcaaatgctgcgggagataggctactacgcaatccttgggggccgaaaccttgccacgggtaggctgtcggactcctgccagaatcttgagtaaggtactttttcccgctccgttttttcccatcagggcgatgcggtctttttcattaataacgaaagaaatatcactaaatagggtagtgccgctaaactctacggctagtccgtctatcgaaatcatacaattctttataatttgaggcgcaaagatagcgaaatatatcaatcttttttataacttgcgggctgaaaaatattattaactgaaatatgttgactaaaaagtaattttagagaataattttaaaaataatatagaaacgatatggaaggcggacaaacaaatgaattcagacctcttatcttagtggctgaggacgacgacagcaacttcaaattgatcaaagcaatcatcggaaagaaatgtgatatacagtgggccaagaatggcgaagaaatcgtggcactgttcaaggaatacggcaacgaggccaaagcgatcctgatggacatcaaaatgcctgtgatgaacggactggatgctacgaagatcatccgcggagaaaacaaggaaatccctatcatcatgcagaccgcctacgctttcagctctgacaaggagaatgcgatgaacgcgggagcgagcgaagtgctggtgaaaccgatcacactgtcgattctgcgcaatacgctgacgaagtatttccccgagctggtctggtagaccgattcttttttgtccggtagactgatctttttttgtttgttaaaccggtctttgctccggcaaacaggatctttatccggtaaaacggtatcgctgagtagaaaaacggtataacaattcgggtgttttttcctgttttgtatttgtgatattaacaaatagctgacggggataatatggattcttactatatgaaaatccacattatccccgtcagctgtgtccggacgtttctatgtcaatccggatattactgtatcaatccgggtgtattgtctggaatgcctctgtccgacagtttcggcagaaggctgtaaaagtaaaataggcggacctcacggtcggcctatttctgttcgtttccgttaatttgttagagttcagaaacgactctatgtaaagtctctcctttgagagattttaagagcgatttttatcggcttccgcctgcccaccaaacgggttcggagtatacgtattgtccgtcaccaaaggcttctttgatggctacatttgccaatacatcgtctgctccgtaaccgaaacgcagcgggaatttgttggaattcagcgggtttttcagttccactaagttctcgttcgcacctttcatacggcggtagtcattgtaagcttccaaagattcgccggatgctccgaagaatgcgagatatttctgtatcattgtttcttttaatggattagctgcaaaaagcggtgctacttcgtcttcaaaataggcttcggcaacagcgtcacccaagaagtcggcatctccacctagccagtagtcggcagcattggcaactgagttttccagattggcaaatgcagcaacaacagcatctttcaaagctgctttcgcttcgtcgtttctgcctcccaggcgacacagtgcttccgcttcaaggaatttcacttcatgataactaattaatagagtaggggcagtcatcgcccatgaaaccatagacatgccataataattttgtaattcttgtggcgtaccgttaggagcaacaccgatgttttcgattgttgtagcttgttctccaccccatccattagcagcgttgccctcggggtccgcttgcacaaatgcctgtggagctcttggatcatttctttctgcaaacttatcgatgaggctttcgctggcagcaagactgttgcggctatagctgaatgtccaaagaggatttaattgagtatcaccgtcataaatatccagtttgcattcttcatctgaactggcaaatgatttgctcacataagtcaggatattttgcaagtcagtaatctgattagcgcttttgttgagcaggcgcattgtatagcgtgccttcaatgcgtaagcggttttgagccacaagccggcctgcgtccttacgtttgctccgtaaatgaggtctttcgaacctactgcaccggacaaaccttcgtcagtggctgttccatctttcaaaagtgtgatggcttcatccaagttctgcatgacttccttgtagatagactcttgcgaatcaattttgggttgcatatacatcggtgtgccgtccggatttaaaactccggtttcgctgaacggggtgtctccgaagacatcggctactactgcaccgttgtaagcgaggaggactctggctattgcttcagttactgcattccctttttccgatggatcttcctggcacttgttgatcacaatttttgcattcttgatattggcataaacgctgatccatgcattattgtaagtggtggcagtggtcggttcaccactgcggacttctgcgcggtagagctggttgccaatacctgtttcgtgctccatgtaaacggacgaatagagtgaaaaatctcctcctactgtgctgaatgcagtgctgactcccaagtctgttatcaaaaacttcgccggagcatcctgcggattattgggattcttgttgactttgtccattgcgtcttccgtgcaggcagaagcaatgacagcagtaaagaaagaaactgccagcaattttcctattgatttatattttttcattgtcttgcagattaaaatttaatattaaagccgaagccaaagctagctgtttgcggcattgaatagtcttcgaaagctccggacatgttgttgttgccctgactggcttccgggtcgaggtcgggcatttgtgcccaaatcagaatgtttctggcgaaagcgttgacagaaagctccatcgacttcttctggagtattttgtagctcactgccacttcgcgcagtttgatgaaagagttgtcgtatacggaagactcgtcgatatcgttcaggcggctgtagtagagctgttgtgcattggctcctgtgatggcgatatcgtttttggttccgtcctgtttgtaaccgtcaaaaatgatcgtgccttcacgattttcggttctcttgcttacaccgtagtagtcagacaatccggtagttctgctgtacatttgcccaccttgtttccagtcaagtacagcgctgatcgtacatttccacagacgcaatgaagtgttgaatcccatcacaaaatccggagaaactttccctatcacctgtgcctcaccggcgacgggcaaaccgttctcgtctaccagacggttgccgtcgtcatctcttttgtagcctacaccgtagattacggggaatttttcacctgccgaggcacggacctgcggggtgacgtaacctcccaatgagatgttttccacgcccggagccagttcgtctacgtagttatcgattttagtccagttgaaagcaaagtcccagttgatattcttcgtacggatcggattgaatcccagtgtgatttcgtgtgtgtcggtatgaattttaccaccgttggtcagcagtttgctggcaccggtagaagacgccaaaggcactgagaatatctgatctttaacgttctgacgcgaataagtatagttcaatgtaatcaggttgtcgaagaagttcacatcagcaccgatttcgtaagaacgtgtattctgcggtttcagattcgggtcgaatatcgtgtaatacggagtatacgcagtcgtacctttgatagggtacataatcggattcagcgagtagaatccgcctccgtacgtcggagtcgagtaataattttctaggaaatcacctgcctgtcctacttctgcgtaagaaactctcagtttggcatagttgattatgtcgtttttcagttcatcaagttctgtcaggatgaagcctgctgatacggatggatagaagaatgaacggttgttgcgcggcatgttggacacatagtcctgacgtccggtcactgtcagataaagcatgtttctgtacgaagccgatacgtttccgaagaagccgaccgtacggtttttccatctttcttcttctgtctgctgcgtggtcgcgttgttgatgtggttccaccctgcaaagttgtagtttgatccgtattcgtagtatttctttctgttactttggatgaactcattacctactatagcattcagaccccagtcgtcgttgatgcgccagtcataattgatggtcagcaaggaattgtaggtagcgtttgtccagccgtagttttctatctgcccacgactgcccccggtgttacttccgtatccgtagctgtcggagtagtgagtggtgtaagcgtctacacccaacatatatttcgcgttcagcttatggttggctgttctgaaatctgtttggtagttagcgtatacgtttccgaaaaagcgattggtatcttccgtatatttattgttgtcaagcgcccagtaagcattgtcaaagttgccacggaaagagttttgagtataaaggtcaccgtcaacatggctggggatacctgcgaggtcgtagcttgcgggagctgcatagacagttctcaacagaccgttgccggaagtcaccgctttgtcaatcgaggttgtgatgtagtttccggcgaaacctgttgtgaagttgttggtcagcttcgtttcagcactcactttcacattgtatctgtccatacctgttttggggataataccatcctgatgcgtatttccgagggatacggagtatgaacttttttccagcgtttgtgctacgttcagcgagttactccaggtgatacctgtatcaaagaattcttttgcattgtcgtaggcctgtggggtagcccacgggtcgagacctgccctggcacgctgcgaaacgtaatatttgccggattgtttgccatgctctttagtgtattgattgtcggtgttgccgccatatagaggatcgttgggcagttcagaaattttgggtccccacgataatcctgagctagtactgtattgaccgccggaaccctgtgcatacgttttttggaattcgggcaggcggccgactacgtcgaagctgacattggatgagaagctgacttgtggtttgcctttttccagtcccttaccacttttggtggtaataatgatcacaccattggacgcacggataccgtaaagtgccgaagctgcctgacctttcagaatgttgatactttcaatgtcgttcgggtcgatatctaccgcacggttggcaaagtccacaccgctcacactaccgttgttctgtatgtccgtatctacgtcaggagtactggtcactgccattccgtcgattacgtaaagcggagtgttatttccggagaaagaacgtgcgccacggatcgtgatctgcgaagatgctccgggcataccgctcgaaggcttgatatccaaaccggaaacttttccttgcaacgctcctgccaggctggagttggatgcttgggtcagttgttcggattttacatcttgaacggcgtatcccagtgctttcttttcacgtgagatacccattgccgttactacaacttcgtccagggctttggcgtcactttttaatactacgttgataacgccttgtttgatcgttacagtctgcggaaccattcctacataggaaacgcgcaaagttttagaagaacttggtacggcggggagttgcctttccggaagcgttaagtgtttttgaggctatttaaggcataaaatgataaaaagataccatttcgaacgaatatctgatgttttttcatgaaaattgcggttttaacactttctttatgctagataataacgtttaataattgctaaattgctttcttgatcttcttattttatctatttttcgattaaattctttcaatatgatactttatagttaaaaacgtaacacttttttaattttgatataaatagtgttatctttgcaccctgttagagactagaagtctatttataggttaaatttaagagagaatttatgaaaagaaaattgatgttctttatgaccttcctttttgtgggtataggtctggtgacagcgcagacgtcccgagttaccggtgtggtaaccgccgaggaagatggcctgcctgttgtaggtgcttcggtattggtgaatggcactactcttggtactatcacggatattgatggtaagtttacaatcacgaatgtaccaagttcttctaagacttattgatattttaaagcctctctttttcctcctttttcgttctatcttgttgtaaatcagaatataagtgcttctttctgcaacttggcttcccggctcacttactataatcgcaaccttttccctttctttttcgatctcagtcatctttttcgggcaggtactcggcttgttttcagggggcggatgcttaggttctacctttatttgaggctttctatgagcgataggggcagaccggtcttttcggcaatgagttgattgtcaattccttgctttttcatgtcgatggctgtctgaaagatgttcaaggcttcttcacgacctttcttcagcccttcctcaagtccttctttcataccttcttcaagtcctttctttcgtccttcttccatccctttttttattccttccttttccgctgcatccattgtcaccaaataatcccggtacactttgacgctattatcgtatagctccctctcttttggggacatagaagccacatcagcgatctcttcgagtttttcgaagacggcttttcgtgccttgaatggcaggcgttttaaagtttccatattatttaatatataaatccaacgttcaaaattcgtttcacattcctcttcgctttttttgaagagggggagggcgatgaatatttgccggaatttctccgagaagagttcaccagtctccttgtctgcaagaataacgtctgtccggagttttatgttcttgtccatgatgaaattcatcagaaagactccgtaaacagcttttatttcaaatttccagtcgtgccccgtccggccctggttgacgatggcacgggagagatagaaaatggagcgttctttaaagttgctctgcatgcggttttgcatttcgacaattatcttttcgcccgtgtccgtggtgcagtagacatcgtagatgatgcctcgtccttccgggtagtccggcagctgctcgttgttcaaaaacgttaagtcggttatcactcgttcaccttcgagaaggtcgttcagaaattcgattagtaaatccttggagacttctctgccgaatattaatttgaatccgtagtcggtgaacggattgataaatttgctcattgttttggttgttgctcttttaggttgtaaagagaggtttctctttgcatacggtaaagaggctttttctttgtcccacaaagataggataaattattgttttatgatgcgtttggcgggagaaataaatgacgtgggcgctcaaaaatgctcatcttcctcttaaaaatgttcatcttcccctaactcgctttttgaggataccggtgtaggtgtcctcaaattctgccgggtgattgagcgcccagaggatgtagtcgcccggctcgttctttttgagcagggtggagcggtattcggagctgaggactttccataaggtgccgcacggaccacccagctttctgcgtcgggcgagggcgaggatgcctttcacggtttgttcgttccggatgccgatggcgtccatgttgaggcgcagcagggattcggagaatcctccggaagcaatgctttcgttcggggcttcttcctgctggtttctttcgtactgggttccgttgtgcttgggttcttcctgctggtttctttcgtactgggttccgttgtgcttgggttcttcctgctggtttctttcgtactgggttccgttatgcttgggttcttctagctggtttctttcgtattgggttccgttatatctagcttctcccttctgatctattcctccatttcttctttcttccttattttcctcctccctttttccggacgagatttctaaagacaaacctttgacagcaacaggcgcagcctgagaaacgccgtttgacggaacgggcggctgctctctatctttctcccattcattttcggttttgctttgtctttctctctctttgtctttttctctttccggtttgatatcattttccatctctcttttcggtttgctttgaatctcagtatccgtttccgatttactttcgatttctgtatccgtttcctgttttgtttgtgggattgttgctgcaatttctcggttttttgcagcattaattttcatagctgctccgtcggtcactgtttttgtagcattgattcctgtgcctgctgcatggatgtctgtgcctgctgcatggatgtttgtgcctgtcgtgccgattcctggctttgttttagtaacttctgtagctgtgatattgactcctgtttttgttgtgttgactcctgcatctactatcttgttttccgcttcatccacttctgtaccttttgaatttatattgcttcttatgtctgcggaattatttcccgttccatccttttcttccttgatgagccaaaaccgttccagcggaagtttgtatttccttcggctgtcggtaatgattttgtggtattgctcttggatggcttgcgaagtcagaatcccgtactccttatatatataggtgtcgaacagtccgacggacaggcagtcgtcgatgatggcctgcatctcctcctcctcgcaacacacttcctgcgaaatgtcgaacaaggtatcttgattccatgcgacgtaaaatcccttttctttgtagatgaggcagagcagggaagtgagtgcggcaattcctgccgcatgatgacggttggaaatgcggcgtaccttcctgtcttggaagaagttgacatcgagcgggaaataatctaatccgggtttggaaatacgggccatctttttgaatatttagagtgatattgactgataaataatgaataaggcgaatcggtaattttaatttagctcatttcagtatggtgataagctacttgatagtcagttctgtatctcaactgagggtgactaaaaagtcgattctatctctattctcctccttcgggaaggaggagtggtcgcagaccgaggtggtaggagaaataatgtttatacctatttttttgtaaatgataggattatgcattcacctaccacctccccctacgggtactcctccttcccgaagctaccctttatacacaagtcttatctgataaactcatacagttcaaactgtgtataaaatctatccagtccattcttaaaggttatatatcctggaatggactggctcttgtatgcactccatgctcctaaccttgcaataatccatgctgcccatgccattgattcttttttatatggattttgctgtatttttgtatttccctcactcttttttcctactatatgtaataattctatttctttgcttgtaaagtagatttctgaagagagtttttcatcttctttatcaaaagaaagtttgagtaccatcacctgcagggctgcctgcaaggaaattaagattagtttttgtaatgccgaaactgtttccaactgtgcgtcctcaatcatgaatccctttcttttgagcactctgaacaactcttcaatcagccatctacaacgataccaaccgatacattcaattgcttgttctacagtctccaccacatgtgtagttagcagtctccattcaatagggctctcatttaccggtgtactggaagatttttctttaacatgtatgcaataaagactaacagggggactgccctttgccggaccgttaacaggagcgcacaaagtgactctttcaaagcgaagttccatgcacgctacccgtttcttacgtccgcttcccgggagcacttcaaagctatactctgcccgtagaacagcctgctccattaatgtattcagatggacagaacagtctggatcatccaaccggcaattcctttcatgaacagaacgtatcagcaagtgaacattatcagtagggatacggctgaaaagctcgaaaatgtccgcttcacggtcaccgatgatcgttttaactgcatcccggggcatttgctcactggcagccattccactttctatccaacgatatgactctttttcttctataggctgatatctgtaattacgttcttcacgacttaaagcagccggtgagcgattccactgcttaaccgaagaaaagcctataggaatatgactggaggcatccactaccaagacaggatgcaaaaaagtaccacattgcttttgaccgacaatgccgggactggctgtttttttcttcattcgctcaacatgagcctcatagtttatctccgaggtatcttgaatacacagtaaatgcttacgaccggaagcattcttacagcaagtgtgtatcagacctgataagatagcatcagagctgactgaggaattgttcaaaaatctataagcacccatcttttctttatgttccttactaaattgattcactatagcactttgatggacaaccatctgagagcaaattaagtttaaacgccgcaaaagccgaggatcacgaatttgatctgtctctaataacatcaagcaaagataaaaaaaataatatatacttgtgtataaagggtagcttcccgaaggaggagaatagagttactattgcgtacaactactccctagaactcctttttcacatcgaagcagggacaggctttcatgtattcattgggtgagatgatgccgtctccgttgaggtcggggcttgtgtcccggtgtccgatgacctgtttcacgttggggaaggccagttgcagagatttcaccagtcggatgagggcggtgcgttgtgcatctgtccgtgtgtcggcggggcggccttccttgtccagtccgccgacgtagcagatgccgatggaacgctggttccagcccatacaatgcgccccgtcgagggtgacgtcccgtcccggttcgatggtgccgtcgaggcggatgacgtaatgatagccgatggaccagaagccacgggcacggtgccagcagtcgatgtcggcagcggtgatgtcctgtcccgcacgggtggcggaacagtggatgatgatggtgtctttcattgcagaaactcctttctttgtcctctttctctgggcaatatataagtgttgaaaccaaaaatggcggattcttcgggggacaggcggcggtaatagtgctgcgtcactgaatgatgtataggggcaaagagagaaataagaggaaaaggcgatgaaacaaaggaaaaagaaactggctgcacacatacattgcctgccttgaactccccgactgaattgctcgatttgcctatcccaagcggattacctgcttcgaactcctcgactgaattactcgatttgcctatcccaagcggattgcctgcttcgaactccccgactgaattgctcgatttgcctatcccaagtggattgcctgcttcgaactccccgattgaatcagctttgacggtcagcacaggtatttcgggtgctatcagaaagcattcttccgaaccgcttctttcggctcttgactttttcttcatggccgattgcttcagtctttcggggtgtaataaatgcagcaccagccaattacgttgtttagggttcatttgttccccttttaccagtgcgttcatggatggataggcttgcaggatatttcctgcctcgtccgttgtggcacaggggacgggggagagggcgggtgacgacggacgcagaccggtccggatggcgtgcatgacattgtcgtaggcatcgcaccattcgaggttggcgacgtggttgttgagcttgtttccgtcgaggtggttcacttgggggagacgcttcgggttggggataaaagctgttgccactaagcggtgtacagagtagccgacgtatatccccttttggcggatggccacgtactcataaccttttgcggtaatgctgctgctgattatcaacttcgatttgcctttgaaactcaatatccgcccgtggtctgaaaccatataatcggaatttgcttcgataaatctccaattttccatactttattctttatattgttaataaaattatacttcgttaaaaagaaatcccttttccgaaaccaccggggataaacggcgcagcctgcatggtagaaacggcgtagcctgcaaggtaaaaacggcataaacaaggactgttaaacggcgtagcctcctcgctgacatgaggcggttccgcccgcttactccggtctttgacctttctcattcctcctctgcacggggttcgagccgttcggcacagcgaacgagaaactccagttcctcccgacacccttgaatggcttcgtacaaagagtccacatgatacattctgcaaagcgtttcccattcttttcgttcttctgaagtcatttgttctccgaaattcatttgctgtccaaaacttatctgctgtccgaaactcatttcaaaatttatctgctgcccgaaactcatttgctctccgaatctcatctgctcttcgaaactcattcgacgcaaaggaaattttcggcatgaaacgtgcgccaccctttggcttcgaggtcgtagtagactacaaacgtattttccggtcgtggcatataggggcggtgaaaactgtgttgatatccggtgagcgtgccgacagcgtggcgcacggttccgtcctgcttggtgtagcagaatttcacgttctccctgtgcatcttccttatcagtccaccgattcggtgggcgatgatgagcgcatcacgccggttcatgtcattgttgcgacggatgacggcggcccgcctcatgagccgtacccgtgggagggaatgttgttttttcatttcagtcatatgattcaattgttttttattgatttcggggcaaaagtagactgtgggtagaataaaaaccgttcacgcttgactaaaatgaaaaaatatgtagaaagagtcacgcgtgacccaaaatgttaaaggtaaatcccgaattttgtcggattaatttaaatataattagtaatgaacaaaaaagaaaactgccagaacagtagtgaaagagaacaacacattgaagtaaaaaggactgtaaatcagaaaagtacaagtcagaaaaaagtaaatcagaaaagtacaagtcagaaaaaagtaaatcagaaaagcatgagtcagaaaaaagcaaatcagagtggcgaaaagtccgtgtatgacgagaacagggatgcccttcaggaaagagtcgaagagaagcaatggaagaaaaagcaatgtaatggcttgcagcacagtgatgacgaagaaaaacagaaagtcatcgattcgattatgaaagtcagccgggataacggctttgacgacgcttatcttcagcagcattcggactgttcggcatcgtcgatcaagcgcttccactcggcctggatgggaaagagaatgtccaattggacgacgatttttaatttagcgcactgcgtgtccgtcaattgtgtctttgccgaaaatctggtcgggatgctggttgtcattattatgttcttgattagagatgccggaattgtgagttaccatatcgactcgaccaggaaagtggtgatagaaataaatttcggtaaagataaattattgcgcatgaaagacgaggaaaagagcgaaaaaggaaaagaaggtaaagacgacgaacacctttgagcgacgacaatgatcgggacaaaggaaagaacaactgacggaatgaggtaagtcctgtaagaacttggtagtctgtattcgtaaaaaaacgattcgatatcagcgatggacttccattttattcccttgttataatgtcaccacaaatgtaatcatattattgagaaaaccatgcagaaacgcttttattctgaaaaataagttttattgttcactcagatttcatattcgatgttgacatcctacgttttctcttttagatatttatttgttttcctttgtcggtttctaccgtattgcacgttcgtcattatttacaaattctaattattgcattctcagttcgggtaaaacgaatccgttttccgagctgagaatgcagatgacggcttttaataagtctgtttgtttttatttctttagtaatatattataaactggcagataagtcgctctaccaagttcttacagaacttacctttttgtatagtaatatttaaagatttaatagcaatattttaagatattcagtgatcggttccgcaaacaatcaaaacaatcactatttatggaagcgcggataactcgaaaaacagcggcacttgcaatctttctgatcagtgcatttcagacttacatttatgccggccgcccctcttcttgtcaactattaatcatcaattcttataccgaaaactgtctgtggagcgatgactttatggcccctgtctataaagagtttcgcgtccagaacagcccggttgacatatgtgccgagcacatggaactgatggcgaccgttgtcccggatatgcgcaaacaggtcttcatgtccgacaggcgctggatcagtgcgcaatgcaggaaagaagcggaggaagtgatgcctttcctgttgatcggcggctatttctggacagacagtgaaataaagaaacatctgctcccggtgatcaaaagccgcctggacggagcgtcgcatccgcacagagtggaaacgacagcgatggggacgcccccatccgtcatcaattatgccgactacgtagagagcggactgttgctcggcctgtgtcccgacgacactgtttttggtatgaagccccccacttttttcgagcggaacaaatattatctggccctgtttttctctttgatggcactggccgtcatctatgtgatatggctccggagggcgctgcatgagaggagcaggcggctggagatcatgaggagctatagcagtctggtcgaaaacatgcccgttctctatgcccgtgtcgagctcatattcgaccccggtgcccggattatcgactatgtctaccgggaagtgaatcccactttcgagaaatacatcctgcccaaagaaaaaatactgggaaagaaatacagcgaactcaatccggattattcgccggaactgcccgacaggtacagcgaactgaatgacaacaggcaaataacctttcagtattatctggagaagacgaaaactcatctgaccgtcatctccatacattccaaaacgaaaggctgcgtcgatgtctttggtgtggacaataccgaactggtgctgacgcagcaaatgctgaaatccaccaaccataagttgtccgccgccctcgacgctgccgacatgaccccttggaaatgggatttgcagaccggcctcctctcgtgcaacgtcagccacgacttgtacgtcaccgaagaggaggtgacgcatgacggcaacctgattatcgtgcccacctccgcctgtttcgcgaaaatctgcgatgaagaccgcgaacgcgtgcgggacgccttcgagcgcctcgccaatggcgaaacgcagaaaatgcgcgaggaatatcgggtaggcagacagtggcttccctccccgcaacagaatgaatgggtagaagtgcgcgcagccgtggacgagcgcgacgcgaacggaaaaccgctgagccttatcggcacttcgatgactgtcacccaacgaaaggaaatggaggaagcgctcgtacaggcaaaggtgaaagccgaggaggcgaacacgctcaaatcttctttcctcgccaacatcagccacgaaatacgcactcccctcaacgccattgtcggcttttcctcgctgctggtgtcggcggaaagggggatttcggaagagaaacaggaatatatcaacatcattgaaaacaacaacacactcctgttgcagcttatcagcgatgtgctcgacctttcgaagatcgaagccggaacgatggagttcgactacgccccggtagatgtgcacggcctgtttatcgaactcgaagatacgttccggttgaggaataaaaagtccggcatctgtatctgctatcaccgccggacgaccgaatgtgtcgtaaaggcggaccgtaaccgtctggtacaggtgatgatgaatctgatgaataatgccgtgaagtttaccggggaaggcagcattgagttcgggtttgatgtgcgcgaagacggtttcctgcatttctatgtcaccgacaccggttgcgggataccggaggaacggttggaagaaatcttcgggaattttgtcaaactcaacagctttgtgcagggcacgggactcggactcaccatttgccgggcaatcgtcgaaaggatgggaggaaagatcggtgctgtctcacggctggggcatgggagtactttttggttcacgctgccttatacggccaacgaagagaaggtttgaaagggacgtggcgtgacggaaatatacttgcttcccgaagaatgggactttttagtcagccccttcccgaagggaggggaagccatgcggatagtcagctcgaatcaaggctcccccaagaaacggaagatgagccttacttgtgccggagtgagcaggatggctttgtcggaatatcccgtgcgggcgagttcgttttgtagtgccgtgttcttggcgatccagctgcggagagtgcggcgtgcggaggcgggctgtatgtggggcaggtagagagtggccagttggcttttgctgtatgcctgtatgcggggcagggttgcattttcttcggaagttggtttcatgatttttgctttcattgtcttttgatactgcttttactatcttttctatatttctttctttcattttcgttgccaatgtaaaggtacgctttttttagtcgtttggtgttgctttgtacagaagtccttggaggcagtatttgtgcgaggccgtgccgactggtgctcttccgttacaagtcgttacatcgtgtatccggacttttttgccatcgcctacttttgtcaccgtaatcgattgcacatagaaaacttacatcaaccattaaaaaaagaaaggaaaacaaccttatgccattaatttacaaaccttaccaggcgaatatcgccaacaaagcgggacagaaactgtattacccccgcctcgtgaaattctcgaaaatggtcaacacgcagaagatggcggagctgatcgccgagaaggcttctctgacaccgggtgatgtccacaacgtgattcgaaacttgatgtccgtgatgcgtgaacagttgctcaacagccgcacagtacgtctcgaaggcttgggcacatttacgatgatcgccaaagccggaggaaagggagtcgtgttggaaagtaaagtcagcagttcgcagatcgtttcgctgcgctgtcagtttactcccgaatatacccgttctgccgatggcgtcactacccgtgcactgacttccggagtagaatttgtccacgtcaaggacgtagcgggcggctttgtggacgacgatgataaaaatcattcgggaggcggagacaaccccggcggaggaagcactcccggaggcgacgacgatgaggctccggacccaaccgtttaatgaggctgaatcgctgactcactaatgcatgatcggttcccttattaaattgctccattcactctgttttttaactctaaagaaggaagctatgaaattatttttagaaaagttattggatattttggaagcactcttgcgcttccgtcgtcggaaagctaaaaagacgggagatttataaaccgacctcctcgcttaaaaattagagaatcccccctttatttaaaaccgtatttgttcatgatatggggttaaataaaggggatttttgtatgggaaagtaataggtaattgtatagtaataggtagtggaatttaattcatttcatttcttgtgcgaaatgattcatacctgctctgagatgtaggatttatggaaaagtgtattatcaaaaaatggggtcacctatacccctgtttgctacattatgttttttgagcccgataatgcggtagttggagaattttgacatctataaaagaatatcccggcagattggataacagtcaaccgcccaaccataaaaagggctgccccaattctacttgggagcagcccttcttgctttttccggtttatctctaatgcattttatttaatcagatagactttttgaagataaacccttttgttgtgtgcttttgggggatgagccaccttacggcatttctgtttccatttggaatttccggcttaccttcatcaggttaatgatgtaagtcactacattttgagcttcctgcaccatggtcagataaaccatacttacccggatactgcccgactggctttggatgcgctgcaactctttgcgtttcagttgcgatagctgtccgttgaggtcgttggcacggcggatttcctcttccatattctgataatcgttgttttccaacttcttgcggcattgctgaatcagataagtgatgtcctcggccacgtcgctgaattcacctttctgaatggcgtcgagcgggttgaagttattgtcgatgtgttcaagacacggttcgcagaggcgcgagatgctgtacaccagttcgctggcgaagtcgttgccttgatagtagtagagtcctttttcgagcacggtgttgttgtcgaggcggcacatggcaacggttccggtgcgtttcatctgcttgatgagctgcttttcgaatttcgtggaacccatggcacgacgtagtccgcggaggttttcgtgtataaaggaggtgatggtcagttcgaaattcgtttcggcgtactccagcactttggcgagttcttcgcgggtatgtttacgcatcagttgcagcgcttcttcgctgtcggcggtctgcatgagttgtttcagcgtttcgttgcctttctctttcgccttgcgtttcttatacatcacctggctgcggatgaggatgaaaatcgctattccgatcagtgcgatgatggagatgttgccgccgtagtgcagcacgagggctacgaagaagcagatggtgaaggcggctccggcagtgatgaaccagccaccgatgacgctcagaacgcctgtgatgcggtagacggcggagtcacgtccccatgcacggtcggcgagcgacgtacccattgctaccatgaaggtgacgtaggtggtagagagcggcagtttcagcgacgttcccaaggcgatgagcagaccggcgaggacgaggttgacagaggcgcggacgaggtcgaaagcggctccgtcggctatgatggcttcgtttttgcggaaacgggagttgatccactgcttcgtgctttcgggcatgatgcgggaggtgccgttggcaagtgtcatgctgaaacgtaccagtgtgcgtgccatcggggtacttccgaagttctcttctccttcatcctgacgggagaggtctaccgaggttttgatgacggcgtgcgcctttttggaggtgcagagggcgtagaccatgatggcgccggcaccgataaggaagtaccacggtgtcttggcggggcctagcagcgaggtcatcaggaagctgtccggacttgctccggctccgttggtggtgtagtctatgaaggaggagtagcctgcgagggggactccgatgaagttgacgaggtcgttgccggcgaaggcgagggcgagggcaaaggtgcccatcagtaccactactttgaaaacattgactttgagccagtgaagcacttgcatcagtgccgtgaagaagacgaagaagctggcgatgagcagcagcgtgttgtcctgtatccactgtttgttttcgggggtcatgaaggagctgtctttcaaccctttgatcagcatgaagtagatgatggaggtggcggcgatcccaccgaaaaggccgatgctgtatttgatgtttttcgtgtaattgaacgtgaaaacgatgcgggcgagccactgtactaacataccgaagaagaaggcgatggccacggacacgaaaatggccatgatcacggaaagtgctttgtcggtgttgatcagatcgcccaacgcaagggtggcgtcattgtttactttgatcagggagagggcgaaagttcctccgagcagctcgaagaccagtgagacggtcgtggaggtgggcatgcccatagagttgaagacgtccagaaggactacgtcggtcagcatgacggcgagcagtatacacatgatttcggcaaagtagaaatgctcgggctgatagattccgtgacgggctatatccatcatgccattggacagggatgcgccaatgaaaataccgatcccggctatgaaaagaatggttttgaacgaagcggccttggcgcctaccgccgaattcagaaagttgactgcatcattactgactccgacgatgagatcgaacacggccagcacgaacaggaaaatgataatgcataagtaaattgtctccataaagaaagttgtgtatgttatttctgggtgcaaaggacggggtttgaggttgcagggggatgtcatacatgttacatttgtgttacaacgttctttcttttgtcttgaaacaaaagaaagaaccaaagaaaaattcaaggcttacttttttctcctactcgcttccttcactacgctaaagggcagaaactcgctccgctcaaacagtctgcccttcttaacgctccgttgcgggcgctcgcttgacggagaaaaaagtaggccgggggaccgtgcgggtggggtggagcggggggaggcggtgcggggggaggtgatgtgtgaggtggcatgtgagggatgtgggaggtgatgtgtgaggggggtgggagttttgggatcaatccgagaaaaaaggttgtttccagtttgtttctttcgaatgaaaaatgaatccgaatgaaaaatgaatccgaatgaaaaatgaatccgaatgaaaaatgaatccgaatgaaaaatgaatcaaacagtagtatctctattggggggtgactaaaaagtcgattctatctctattctcctccttcgggaagctaccctttatacacaagtcttatctgataaactcatacagttcaaactgtgtataaaatctatccagtccattcttaaaggttatatatcctggaatggactggctcttgtatgcactccatgctcctaaccttgcaataatccatgctgcccatgccattgattcttttttatatggattttgctgtatttttgtatttccctcactcttttttcctactatatgtaataattctatttctttgcttgtaaagtagatttctgaagagagtttttcatcttctttatcaaaagaaagtttgagtaccatcacctgcagggctgcctgcaaggaaattaagattagtttttgtaatgccgaaactgtttccaactgtgcgtcctcaatcatgaatccctttcttttgagcactctgaacaactcttcaatcagccatctacaacgataccaaccgatacattcaattgcttgttctacagtctccaccacatgtgtagttagcagtctccattcaatagggctctcatttaccggtgtactggaagatttttctttaacatgtatgcaataaagactaacagggggactgccctttgccggaccgttaacaggagcgcacaaagtgactctttcaaagcgaagttccatgcacgctacccgtttcttacgtccgcttcccgggagcacttcaaagctatactctgcccgtagaacagcctgctccattaatgtattcagatggacagaacagtctggatcatccaaccggcaattcctttcatgaacagaacgtatcagcaagtgaacattatcagtagggatacggctgaaaagctcgaaaatgtccgcttcacggtcaccgatgatcgttttaactgcatcccggggcatttgctcactggcagccattccactttctatccaacgatatgactctttttcttctataggctgatatctgtaattacgttcttcacgacttaaagcagccggtgagcgattccactgcttaaccgaagaaaagcctataggaatatgactggaggcatccactaccaagacaggatgcaaaaaagtaccacattgcttttgaccgacaatgccgggactggctgtttttttcttcattcgctcaacatgagcctcatagtttatctccgaggtatcttgaatacacagtaaatgcttacgaccggaagcattcttacagcaagtgtgtatcagacctgataagatagcatcagagctgactgaggaattgttcaaaaatctataagcacccatcttttctttatgttccttactaaattgattcactatagcactttgatggacaaccatctgagagcaaattaagtttaaacgccgcaaaagccgaggatcacgaatttgatctgtctctaataacatcaagcaaagataaaaaaaataatatatacttgtgtataaagggtagcttcgggaaggaggagtggtcgaagaccgaggtggtaggagaaataatgtttgttcctatttctttgtaaataacaggattatgtattcacctaccacctccccctacgggtactcctccttcccgaaggaggagattttaagatactattgactatcatttaattcaaaactgtaaagtatggagccaaaactgggttttcggactgcccgagttttgtcatggaaatgataaaagtgtgacggttgtgttgtaatatattgaattgcttgtaaatatttaattttatattatttgtcgaagattttatttgtatgggtgttttttcgtccgaaaaaacttcttgcctacgaaggctttgcccctcgtcccgtgatgttagtcagataactgctgacaaagaatattgtcgaaggggaatcggctaattgctttttcagaagatgaacgaaagcaataagcacgattctgttaagattatcaagactgacattgggtgtagctcaatgactgctttcctccggtcgaaaaacatcggaccggagggcaagcagttggagatgatcaaaaagttatgagtgctgcgcttcctgcgcttttttactcagccattcataaaaatcgtattgggcacggacagcaggggtgccggacgctctttttttgaatacgttttgcagtttgtcgtctacccaacaggctttttggttgtcagcgagctggatatggagcatttcgatcagactggcgcgcaggtcagggtcgaggatgggggtgacggcttcgatacggcggtagaggttgcggcgcatccagtcgggcgagcccatgtatattttggggtgcccttcgttgccgaaataccagatgcgggcgtgctccagaaaactgtcgacaatgcgggtgacacggatgttacggctgtatgactgctccggtatgaggcagcagatgccgcggacgatgaggtcgatctgcacgccgtgttcggaggcctcgtagagtcggtcgatcattgcggggtcttggagggcgttcattttgaggatgatacgtccgcctttgccttggtcggtaagggatatttcacggtcgatgaggcggttcagttccggtatgaggttgaagcgggcgacgaggagagtggtgaatttcgggtcttccttgccttgcagggtgcggaataggttgtaaaggtcgttcactatttccttgcggcaggtgaaaagtccacagtcggcgtatagggtggcggtcttttcgttgaagttgcccgtgctgatgtaggcgtagctggggattttctctccattcagtccgcggcgacggacgagggccactttggcgtgtacttttagtccggggatgctgtaaatgattttgatgccggcggcttgcatcatttcggcggtggcgaggttgttctcttcgtcgaaacgggctttgagctcgacaaatacggtgactttcttgccgttctgcgcggcggctatcaaggtgttgatgacggccgagttttcggctacacggtattgggtgaccatgatttcgcgcgtctccggattgtgcactgcttcgtagaggaagtgggtgaaatgctcgaaggagtggtacgggtaatacagcagcagatccttttgggcgacgtagttgaagatcgattctttttcgtcgaggatgttcagcttcatcggttgcggcttttcgatgcggcggagagacttgttcgggttgggcaggtggcgcaggtcttcgaggttcaggtgcttgtcgccggggacgagttcgtcacggtggatgcggaaggcgtcgaccagaaagtcgaggaagtcttgcggcatggcacggtcgtagacaaagcggcagacgtcgcctatcttgcgtttttttaccttctttttcagttgggctacgaggtcggcgctgctggcggtgtcatctatcagaatgtcggcgtcacgggatattttgatgcagtagctcgaatcgacgtcgtagccggggaaaataaggttgaggttcgctttgatgatgtcctcggtgaacatgatgtaatagttgtctccacggggcggaagttcgatgaaacggggcactttggcgtacggctgcttcatgacgaaatagaaaggctgccggttggcggggttcctgttttccttcggatagaggcggatggcgaggtagagccggttgtctcgcagaaaagagacgattttgtctttcgatacgggcacgggttgcaggtaggggaagatttcttcccggaaaaagtccttgataaactgctggtgaaacggttccacatgtctgtcctggtagaagatgatgtggtttttgcgcagggcgggcagtatcttttcttcgtaaatgcgtacacggtcgtccagctggcggtttacttcgtggttgatttcttccacgagttcgcgggcggattgtacggtttcttcatcgctctccgttgcgccggatgccacggccttgtggtccgccacccggattttgtaaaattcttccagattggaggagtagatggagatgaaattgatgcgctcgtatagcggcaggtgctcatccagcgcttcgagcaacacccgatagttgaatgagagccagctgatatcacgtttgaaataattatatttgctttccatgtgctttaagattttcccaaatatagtatctttgcaggactaaacaaagaaaattatgacaagaattggattattgtccgatacccacgcttattgggacgaaaaatatctcgaatattttgaatcgtgcgacgaaatctggcatgccggagatatcggttcggtagaagtagccgagaagctggcggctttccgtcccctgcgggcggtttacggcaacatagacgggcaggaaatacggaagatgttcccgcaggtgaaccgcttcacggtggacggagcggaagtgctgatcaagcatatcggcgggtatccgggcaagtacgacccttcggttatcggcagcctgatggcacgtccgccgaaacttttcatcagcggacactcccatatattaaaggtgaaatacgacaaaacgttggacatgctgcacatcaatcccggagccgcagggatgtccggcttccataaagtgcggacaatggtgcgctttgtcatcgacaacggaacgttcaaagacctcgaagttattgaactggcaggatagatttcttacaattcattttgtcacgtcagatttctttccgacctttgcacacagtaaaatgaataactcagacgacaatgaaaggaattattctggccggtggaagcgccactcgtctttatccgctttccaaagcgatttccaaacaaatcatgcctgtatacgacaagccgatgatctattatccgctgtctacgcttatgctggcagggatacgggaggtcttgatcatctctactccgcgtgatttgccgatgtttcgggacttgttgggctcaggtgaggagctcgggatgtctttctcttacaaaatacaggagcagcctaacggactggcacaagcctttgtgttgggagctgatttcttgaacggtgaggcaggttgtctgattcttggggacaatatgttttatggacaagggttttccgctatgctccggcgtgctgccggtgtggagaagggagcctgcatcttcggctattatgtgaaagatcctcgggcttatggggtagtggagttcgacgaacaaggcaaagtgatttctctggaagaaaagccactggtgccgaaaagtaattatgccgttcccggactttatttctacgacgctaccgtgacggaaaaagcggcttctctccgcccttcggcacgtggagaatatgagataacggacctgaaccgcctgtacctcgaagaaggaacactgaacgtggaactgttcggacgcggattcgcatggctggataccggaaactgcgacagcctgctcgaagcctccaacttcgtggctaccattcagaaccggcaaggcttctacgtcagctgtatcgaagagatagcctggcggcaaggatggatttcgtccggacaattgctgctgctcggacagaaactcgaaaagaccgaatacggtaaatacctgatagaactgtctaaacaacccttgaaataaacataaataatcatatatgaaaacttatctggtgaccggtgccgcaggatttattggcgccaattatattaagtatatcttggccaagcacagcgatataaaagtggtggttcttgacgccctgacgtatgcgggtaatctgggaactattgccaaagatatcgataacgaacgttgtttctttatcaaaggagacatttgcagccgcgaagtggtggacagcctttttgccgaataccgtttcgactatgtcgtgaacttcgccgccgaaagccatgtagaccgcagtatcgaaaacccgcaactgtttctgatcaccaacatcctcggtacgcagaatctgctggattgtgcccgccgtgcctgggtgatgggtaaggacgaacagggatatcctacctggagaaaaggagtgcgctaccatcaggtatctaccgacgaggtgtacggctcactcggtgcggaaggctacttcacggaagaaaccccgctttgtccgcacagcccgtacagcgcttcgaaaaccagtgccgacatggtagtcatggcttatcacgacacttataaaatgccggtaacgatcacccgctgttccaacaactacggcccctatcattttcccgaaaaactgattccgctgattatcaagaatatactcgaaggcaaacatctgcctgtctacggtgacggaagcaacgtgcgcgactggctttacgtagaagaccactgcaaagcgatcgacttggtagtgcgcgaaggcaaagagggcgaggtgtacaacgtaggtggtcacaacgaagaaaccaatcttgaaattgtgaagctgaccattgccactatccgtaaactaatgaccgagaaaccggaatatcgtcaggtccttaaaaagaaagtgaaaggtgaagacggagaaatctccgttgactggatcaacaacgatctgatcacttttgtcaaagaccgtctggggcacgaccagcgttatgccattgatcccacgaagatcacgaacgccttgggctggtatcccgaaacgaaatttgaagatggcatcgtgaagacaatcgtatggtatcttgaaaatcaagactgggtggaagaggtgaccagcggagactatcaaggttattacgaaaagatgtacggaaaataaatcaatgtcggatcaagaatcctattgatagcaaaatacccattaacagcatattacgtgaagtctcacctagtatgctgtttaattttttaccactgtgaatctgcaccatccgtctccatgtgaggacatgaggaatcaggtagagtaacggaagaagtgcggcaaacaagtgtccttcgaagaagaaccagaaacacagaagacttgctgccacccccagcatcaaataaagatagcgtccgaacttctcgccaaaacgaacgatgaccgtccgctttccgctccgtgcatccgcttcacggtctcggtaattgttgactaccagcaaggtatcaatcagcagtccgcagatcagagaagctaccgttgtgtccgaagtccatgtcagcgcctgcacgtagtacgttccgcccacggggacgaatccgaaaaatacgatgaccagaacatcgccccagccgttgtaggataatggataagggcctgtggtatagaggaaagcgaagagtacgcagagaagtcctactatgatcagctcccatccggcataaaacagcagcgcagatccgatcagacaggcgaacaggacggtgacgatgattccgtttcgcatggctctcggtgaaatccagccttgtgcgcaggctcgttccggtcccagccggtcttcgcggtcggttcctttgaggtagtcgaagaggtcgttgataaaattggcggcaatttgcatcagaccggcgaacaggcagcagataagggccggcaaccattgaaaatgtccatccatataagcaagtgcgctaccgatcatgaccggcgtaatggctcctgtcagagttttgggacgtgctgctaatatccacgcacgcagcgagttacgctttacttcttccatgctttaatatataataataagttttgacggacaaagatacatgatttttcctatctttgcgcctcaaatagtgggggaatgtgttatatgtagaagaaaataaaccaaagaagatgaaaaaaataaattacctgttcataatattcgtattattcctgttcgtatcttgtaagtcaaagaagaatgttgtatcgatcctgcctcgtcctgtgctcaatgtcgattccgtccgtccggacagttccgccgctatcgacggcttgtttgctccggatcattctcagcttgccgacttgaaagtttcgacgaaaaagcagaagaaaacagcgaagaaagaagctgcgaccgagcaggaagaacgtaatttggtacttcgcggaacgaagatcacgtcttctaccgtgaacgtccctgccacttatagcggcatagaccgtgtcgtggaatatgacttcacccaccgtgatgtccccgaagccttcgaaggcttccgcatcgccttcatttccgacttgcattacaagagtctgctgaaagagaaaggcttgaacaaccttgtcgatcttttgatcgcccagaaaccggacgtcttgctgatgggaggagactatcaggaaggctgtgaatacgtagaaccgttatttgccgcattggcccgtgtgaaaacaccgatgggaactttcggagtaatgggaaataatgactatgaacgctgccatgacgaaataatccgcacgatgaagcattacgggatgcgtccgctggaacacgaagtcgatacattacgcaaagacggtcagcagattatccttgccggagtacgcaatcctttcgacttgaaacaaaatggggtgtcgcccacactggcgctttctcccaacgacttcgttatcttgttggtgcatactcccgactacgtggaggatgtttcggtggccaacacggacatcgctttggcaggacatactcatggtggacaggtacgcgtattcggttacgccccgatacagaactcccactacggcacccgctttctgaccggactggcgtacaattcaactaaaatgccattgattgttactaatgggatcggtacttctcagatgcctgtacgcattggtgctccggcggaaatcataatgattacgcttcatcgtctcaaagagtagatgatcagtgctcccttatactctgtcggatatattctctaatatactcccaaacctttggatgcaagaagtatcttacatctttcttctcatcaagtgcctgacggataaacgtagaacttatttcaaaggtaggtgaatggaccagacggactgtttcgggcagcccgttttcatttaccgggaatccggggcggggatagataagaatacggttttctttgatgatgcgctccgattgataccagcggtcgaagcgggcccagttatccgagccgataattaagtagaagtcccgttccggataggtttcatgtagcttttccaacgtatgtacgctgtatgaagggcggggcagatgaaactcgaagtctgaagagcggaagcggggatattcttctgtggcaagttctactaaccggaggcgcaggtcgtctggccatagctccgttcccgctttcagcggattttgcgggctgaccataaaccaaatttcgtccagtccttcatactcgcaaagatagttggccaaggccagatgtccgatgtgtaccggattgaatgacccgctgaagattccggtttttagtttttgtcttttcagagactctttcattccttattcagaaattctttgataactttcagtgtctcagcctttgccgcctccagatcatcattgacgatgacacgatcaaactggggagcaaaagtcatttcgtattccgcctttgcgatgcggcattcgattacttcgggctcatccgtgccccgacccgtcagccgacagcggagttcttcgatggagggcggctgtacaaagatggacaacgcacgctcaccgtaatactttttgatattacatccgcccactacatccaagtcgaataccacgttctgacccttctccaactgcttttccacttgttctttcagcgttccgtaataccgatccttgtatacttcttcgtattccaaaaactcgttgttctcaatgcgacaacggaactcttcgggagtaaggaagaaatattcgaccccgtgtttctccgtcccgcgcggtgggcggctggttgcagaaatggagaacgcgagatttaagttctgcgtcagcagataattgataatagtcgatttgcccgaaccggacggggcagaaaaaataattaacttgccagtcatttgtttaattgaaaattgagaattgaaagttgaaaaccctacacttgtcgacattttcaactttcaattttccattaaataattacattacgttcagcacctgttccttgatctgttccagctcatctttcatttgcacaacgattttctgcatttcggcatggttggacttgctgccaagcgtattgatttcccgtcccatttcctgagcgatgaaaccgagctttttgccttgtccgttgccgctttccagcgtgctgatgaaatatttcaggtggttggtgagacgttgtttttcctcgttgacatccagcttttcgatgtagtagatcagttcttgttccagtcggttcttgtcgtagtccgtgttcagcgtcttttcgagcgcgtcggtgatacgttccttgactttctccacccgttctttttcgtaaggagttatcttttcgagcaatagtgcgatgttagctatcttttcgcggaacttcttttccagtgcggcgccttcctgtttgcggaagtctaccagatgaccgattgcttcgagaacggtggcacgtaccatttcccattcttcttccgtcaactcttggatttcagtcttagacataacgtccggcatacggagcaacgtctgaaaccagtcggtagggacggggatgccgagattttccgagatcgcctgaatctgtttgtagtagccttccaccaaaacttggttgataggagtcgcgctttccgcactctcttttttctctatccagaggctgaagtccacctttccacgttccagcactttggagatttcgttgcggatttcgatctctttttcacgataagccggagcgatgcgagtggaaagatccattgctttgctgttgagcgacttgatttctacgtttatctttttatctggaagttcggccgtagctttgccgtatcctgtcatcgactgtatcatatacttaaagttttgtgcaaaagtacacgaatattttaagaattggaaataatcatgtaaatttgcgacaatttaataagctgatttttatgtcgtgtatactgaatattgaaacctctaccactgtttgctcggtagcggcaagtcaagacggacagacgatttttgtgaaagaagacttgaagggcccttcacacgccgtgtctttgggagtatttgttgatgaagcgttgtcgttcattgatagtcatgccatacctttagatgcagttgcagtgagttgcggtccgggatcatacacaggattgcggattggagtttcgatggcaaaaggcatttgttacggacggaatgtacccttgatcggtcttcctacgctcgaagtgctgagtgtgcccgtgttgctgtatcacgatttgccggaagatgcgttgctctgcccgatgctcgatgcacgccgtatggaagtgtacgctgccgtttacgaccgtgcattgaacgtgaagcgcgctatcgccgccgatattgtcgatgagaactcctatctggagtttctgaacgaagcgcccgtttatttctacggaaatggagccgccaagtgccgcgagaagatcacgcatccgaatgcgcattttatcgatgacatccatccgttggcgaagatgatgtatccgctggcagaaaaagcagttgccagagaagactataaagatgtggcctacttcgaacctttctatctgaaagaatttgtagcctcgttgccgaagaagtcacttcttgaataacgcacttcagttgaataacgcacttcagttgaataaagcgcttcagtaagtgaaccgcctttggcgggaaacagtgattagtgagtgaccgtcgtcctccgacttttaatttttaatttcaaaacttttaatttaaaagatgcaatacaatacccagcagaaaagaatgccgcttcccgagtacggccgcagcatacagaacatggtagattatgcgttgaccattcaggaccgtgccgagcgtcagcgttgtgctaacacaattatcaacatcatgggaaatatgttcccccatttgcgtgatgtgcccgatttcaagcataaactctgggatcacctggccatcatgtccggttttgagctggatattgactatccctacgaaatcatccgcgaagacaacctggtgaccaagccggaaccgatcccatattctaccacccgtatgcgctaccgccactacggacacacgctggaagtactgatcaagaaagcctgcgaacttcccgaaggaaacgacaagagaaatctgacagccatgatctgcaaccacatgaagaaagactacatggcatggaacaaagataccgtagacgaccgtaaaattgcggaagacctcgacgaactttccggcggcaaactccaactgacagacgacatcgtccgactgatggcagaacgtctgaaccagaactaccgcccaaaggtgaactacaataataatcggaataataatccgcggagaagatattgaagtattaggtattaagtattaagtattagcgcggcgatgttgtttgctgtatgagattttgcacttgcggtctaatacctaatacttaatacctaatacctaatacttattacttaatacttaaaataaatggcttcatttgtaattgaaggaggacatcggcttagcggggaaattcatccgcaaggagccaaaaacgaagttttgcagattatctgtgccacgttgctgactgctgaggaagtgacggtgaacaatatacctgacattctggatgtcaacaatctgattcagcttatgcgggagatgggagtaacggttgcaaaggaaggcgttgatacctacagttttaaggcggagaacgtcgatctggcttatttggagagtgatgagttcttgaagaagtgttcgagccttcgggggtcggtgatgctgatcggtccgatggtggcacgtttcgggaaggcgttgatttcgaagccgggcggagacaagattggtcgccgtcgtctggatacacactttgtggggattcagaatttgggagccgatttccgttatgacgagtcgcggggtatctatgagataacggccgacaggcttcagggcagctatatgctgcttgatgaagcgtccgtgaccggtacagccaacattctgatggctgccgtactggcaaaaggcactaccaccatttacaatgccgcctgcgaaccctacttgcagcagctctgccgtatgctcaaccggatgggagcaaagatcagcggcatcgcttccaatctgctcaccatcgagggcgtggaagaactgcacggcacacagcacaccgtattgcccgacatgatcgaagtcgggagtttcatcggcatggctgccatgaccaaaagcgaaattaccattaaaaacgtttcctacgagaacctcggcatcatccccgaaagtttccgccggctgggcatcaaactggaacagaggggagacgatatctacgtccccgcacaggaaacatacgaaatagaatcatttatcgacggctccatcatgaccattgccgacgccccctggccgggactgacacccgacttgctgagcgtgatgctcgtagtggccacccaagccaaaggaagcgtactgatccaccagaagatgttcgaaagccgcctgttctttgtagacaagctcatcgacatgggtgctcagatcatcctttgcgaccctcaccgtgccgtagtaatcggacacaaccacggcttcaagctgcgcggcgcccgactgacttcgcccgatatccgtgcaggtatcgcccttctcatcgccgccatgagcgccgaaggaaccagcacgatcagcaatatcgaacagatagaccgtggctaccagaacattgaaggacgacttaacgccatcggcgccagaatcactcgaatatgataaagaaagaagaagtatataaaatcggactattcaacaagccgcacggcattcacggcgagttgcagtttaccttcacggacgacatcttcgaccgtgtggactgcgattatctgatctgtctgctcgacggtattttcgtaccgtttttcatcgaggaataccgtttccgttcggactccaccgcactggtgaagctcgaaggcatagatacggcggaacgcgcgcgtatgttcaccaatgtcgaagtctacttcccggtgaagcacgcggaagaggcggaagacggcgaactgtcgtggaacttcttcgtcggtttccgcatggaagacgttcgtcacggcgagctgggcgaagtggtcgaagtagataccacgacggtgaacaccctttttgtggtcgaacaggaggacggagaagaactcctcattcctgcacaggaagaatttatagtggaaatcaatcaggaaaagaagctcatcacagtcgagcttcccgaaggattgttgaatttggaagatttggaggaagattaataattaataaagatgccaagaaaacggagtaaagcattttggaacaatttcaagttcaagtataaactcaccattatcaatgagaatacccttgaagaaatcgtggggcttcgggtatccaagctgaacgggctttcggtgctgttgtccgtgctggcggtgctttttctgattgccgcctgtatcattgccttcacccctttgcgcaactatctccccggatatatgaacagtgaagtccgcagtcagatcgtggacaacgcgctccgcgtggattccttgcaggaattgctcaacaggcagaacctctacatcatgaacatacaggatattttcagcggaaaagtgcccatagacagcgtgcagacgctcgattcgctgaccgccgcccgcgaagacaccctgatggaacgtaccagacgtgaagaggaatttcgccgccaatacgaagaaaatgaaaaatataatctgactacgatcgtttcgcagccggatgtcaacggactgatcctgtatcgtccgacccgtggaatggtttccgaccatttcaacaccgataagaaacactttggaacggatattgccgccaaccccaacgaaagtgtgctggcaactatggacggcaccgtctttctgagcacctacaccgctgaaaccggttacgtgataggcgtacagcacagtcaggatttcgtctcgatctacaagcactgcggctcgctgctgaaaaaagaaggcgaccgcgtgaaaggaggcgaagccatcgcactggtgggaaacagcggaacgctcagcacagggccgcatctccacttcgaactgtggtacaagggacatcctgtcaatccggagaagtacatcgtgttttaaagccaatgacgagaagtgggatatacgattataagtgacaagtgacagaggaattagataataatggattcagaaaagaagaataagaagaaacaaatagctattttaggctctacggggtctatcgggacgcaggcgttgcaggtgatcgaagaacaccccgacctctacgaagcctatgccctgacggccaacaaccgggtagaactgctgattgcacaggcacgcaagttccagccggaagtggtggtgatagccaacgaagaaaagtacgcccaactgaaggaagcgctgagcgaccttccgattaaagtatatgccggaatcgacgcggtctgtcagatcgtggaggccggaccggtggatatggtgctgacggcaatggtgggctatgccggactgaagccgacgatcaacgccattcgtgccaagaaagccattgcgcttgccaataaggagacgcttgtggtggcgggagaactgatcaaccaactggcacagcaataccgcactcccattttgccggtggactctgaacactcggcagtcttccagtgtttagctggagaagtcgggaacccgattgagaaggtgatactgaccgcttccggcggtccgtttcggacctgcacgctggagcagttgaagtccgtcaccaagacacaggcattgaaacatcccaactgggagatgggagccaagatcaccattgactccgcatccatgatgaacaaaggctttgaggtcatcgaggcgaaatggttgttcggcgtgcagcccagccagatcgaggtggtggtgcatccgcagtcggtcattcattccatggtgcagtttgaggacggtgccgtcaaggcacagctaggcatgccggatatgcgtctgcccatccagtatgcgttctcgtatcccgaccgtatctgctcttctttcgacaggctcgacttcacccagtgcacgaacctgacgttcgagcaaccggatacgaaacgtttccgcaaccttgccctggcttatgaggcgatgtatcggggcggaaatatgccttgcatcgtcaatgccgccaacgaagtagtggtagccgctttcctccgggacggcatcagcttcctcggtatgagcgatgtgatcgaaaagacaatggaacgtgccgcgtttgtagccgctcctgcttacgacgactatgtggctaccgacgccgaagcgcggagaatagctgcggagctgattccgtgatagctgcggagctgatttcgtgaacaatgaaaaatataaataagtaatataaattagaaagcgcctcggttttcctcttatgagcagagggtttggatgaggctttaaattgtaaatagactatatggaaacatttttaattcgtgccctgcaactgataatgagcttatccttgctcgttattattcatgaaggcgggcatttcctttttgcccggttgttcaaggtgcgtgtagaaaaattctgcttgttctttgacccgtggtttaccttgttcaagttcaaacccaagagaagtgatacggagtatgcggtaggatggctgccgctgggcggttacgtcaagatagccggaatgatagacgagtcgatggacaccgaacagatgaagcagcctgagcaaccttgggagttccgttccaagccggcttggcagcgccttctgatcatggtgggcggtgtgctgttcaacttcctgttggcgctttttatttattcaatgattcttttcgcttggggcgaccagtatataaaggtccaagaagctcccctcggtatggacttcaacgaaacggcgaaagcggtcggttttcaggatggagacatccttttgtctgccgacaatgtgccttttgtgcgttatgacggcgatatgctgagtcagatagccgatgcccgtgaggtatcagtgcttcgtgacggcaagaaggcctccgtctacattcccgaagacatgatgcagcgcctgatggcagacagcgttcgttttgcttctttccgtttcccgtatgtgattgacagcgtggtggttaattctcccgctgcgcaggcaggcatcctgccgggcgacagtatcatcgcattggacggaaaatccatctccttctctgatttcaagcagacgatggcggaacgcaagaaaaacgccgaaacgcttctgaaagacagcatcgaccctcgtctgatcacgctgacgtatgtgcgtggcggtgtgaccgatacgacttccctgcgcgtggattccgcttatctgatgggcgtagttgccagtctgacaacggatcgtctgctgcctatggtgaaaaaggaatacacattctttgaatctttccccgcaggcgtctctctgggtgtgaagacattgaaaggatacgtcggcaacatgaaatatctcttctcgaaagaaggagccaaacagttgggcggcttcggtactatcggaagcattttccctgctacgtgggactggcatcagttctggtacatgaccgccttcctttccatcatccttgccttcatgaacattcttccgattcccgcattggacggcggacacgtgctcttcctcttctacgagatgatagcccgtcgtaaaccgagtgacaagtttatggagtacgctcagatgaccggtatggtgcttctgttcggcttgctgatctgggcaaacttcaatgacatattgaggttcttcttctaagcagggattggcaagacacacacacccgtcctcccctcgtgcagaccggaagttgtcagaacagcaatcccggcgacagcggactgctggcggataaaaggaggatgtcggcgatgaagcaatgtatgttgttgaaatacagtaaaatatagtgtactatttatcgtatatagaaacggcgctttaacactacgttaaagcgccgtttctatatacgataaatgccttagtctgccaacgatgatacgccctttctccttttggctctttggatgcccggagacgaatgttaaatcattaacattctttggggtagtccgaaaagctggttttagctcgatagtgcaaaggaatgaactaaacagtagtacacaatagtaacttaactctcctccttcgggaagctaccctttatacacaagtcttatctgataaactcatacagttcaaactgtgtataaaatctatccagtccattcttaaaggttatatatcctggaatggactggctcttgtatgcactccatgctcctaaccttgcaataatccatgctgcccatgccattgattcttttttatatggattttgctgtatttttgtatttccctcactcttttttcctactatatgtaataattctatttctttgcttgtaaagtagatttctgaagagagtttttcatcttctttatcaaaagaaagtttgagtaccatcacctgcagggctgcctgcaaggaaattaagattagtttttgtaatgccgaaactgtttccaactgtgcgtcctcaatcatgaatccctttcttttgagcactctgaacaactcttcaatcagccatctacaacgataccaaccgatacattcaattgcttgttctacagtctccaccacatgtgtagttagcagtctccattcaatagggctctcatttaccggtgtactggaagatttttctttaacatgtatgcaataaagactaacagggggactgccctttgccggaccgttaacaggagcgcacaaagtgactctttcaaagcgaagttccatgcacgctacccgtttcttacgtccgcttcccgggagcacttcaaagctatactctgcccgtagaacagcctgctccattaatgtattcagatggacagaacagtctggatcatccaaccggcaattcctttcatgaacagaacgtatcagcaagtgaacattatcagtagggatacggctgaaaagctcgaaaatgtccgcttcacggtcaccgatgatcgttttaactgcatcccggggcatttgctcactggcagccattccactttctatccaacgatatgactctttttcttctataggctgatatctgtaattacgttcttcacgacttaaagcagccggtgagcgattccactgcttaaccgaagaaaagcctataggaatatgactggaggcatccactaccaagacaggatgcaaaaaagtaccacattgcttttgaccgacaatgccgggactggctgtttttttcttcattcgctcaacatgagcctcatagtttatctccgaggtatcttgaatacacagtaaatgcttacgaccggaagcattcttacagcaagtgtgtatcagacctgataagatagcatcagagctgactgaggaattgttcaaaaatctataagcacccatcttttctttatgttccttactaaattgattcactatagcactttgatggacaaccatctgagagcaaattaagtttaaacgtcgcaaaagccgaggatcacgaatttgatctgtctctaataacatcaagcaaagataaaaaaataatatatacttgtgtataaagggtagcttcccgaaggaggagaattgaagatagaaccgactatcatttagctcataacaatatgtgaaagaaacaaatcggaaacaaccggttttctggattgatcctagtttcttctcctatgattttcgctcccgatgacagatagttttattcgtcatgaccgattcgtttctcttttcagcgtagacggttgcgacaaccgcagactgctgacaatcgccgccacaacagcaaacccacttccgaccataaggcagaccgccgtactccggtcgtgcacgacaaaactgaaaagcaacgctaccagcgtagtaccgaacgtctgccccagcaaacgtgccattcccagcattccacttgcaccgcccgaacgtttcgttggggcggaagagataatcgtactgttattgggcgtctgaaacaacccgaaaccggctccgcaaagcatcagacgaagaattatactgatatcggacgattcggcagtaagccccgaaagtgaaaaaagtccgacggcaaacaacgccatcccgatactccccaatatccccggatgaatgcgttccaccagataacctgccaacggtgccgtcaccagtgtagccaacggccacggagtcagtaacaatcctgtcatgacctcgctgtgccccaacgtattctgaaggaaaaacgggagagacaccatggccgccatctgagcgataaacgaacagatagacgtcagaatcgaaagccggaaaatcggtatccgcaataagtccagcggcagcaacggagtcgtctgagtcagttgcctccgtacgtaaaacgttcctacgatggccaatatgatcaattgcagcacaaggaaatccatctcctcatgatgcgcgaatccgtccagcgtataaatcagtaacccgaacgtgaccgcattggctatcgcactcacgaagtcaaacttccgcttcgaccgctcttcctgtctcggcaaatgcttgatacccagtagcagtgccgtaatccctagcggtacattgatagcaaacagccagtgccagctggctatcgaaagtatgccgcttgccaccgacggaccggcagccgccgatatcgccactaccatcgcattgattcccattccccgcccgatctggcttttcgggtatacgtagcgcagctgcgccgtattcacacttgtgatggccgacgcactgaatccctgaaagatacgtgcaatcgtcagcgtccagaatgaatcggacaaggcgcagatcagcgaagtgatgcaaaacagcccaatgcccgacaggaacactttccgataaccgataatctcccccaaagaagagaaagacagcagcgaaacaacgatagccaactgataaccatttataatccacgtagttacagcaggcgaagttccgaaatcgtgcgaaagcgtagggagtacgatgttgataatattcacgtcgagcaccgacatacaaagtgcgaatccgatggaaaccactgcccagatacgtctcggcattggcagtccatcggtttcatctatagaagtggtattattggcttgtatcataaaaaaaacttattctagtagaaccttattttgtttgtaaatgtaaacaaaacaaagaagtacgtgtttcaatcttctttgaaatataagtttttttagcgcaggagacacgcccacaacagttcgtagtagctccccccgcactaaactaatacaaaacctcccccaccattattacctataacctattacttattacctattctcaatatcctctgattgctgcttccccgaaattccagataaggtgaaaagagcgcctgttcgaaacgcccgtccaccagcacatctatgtagtcgagtacagccttcaagcgcggattagcctgaatctcttcgtacgtatatcccgtatagcaccagatattcagccccgtttccttctttacccttttgacaaaaagcaggaaagcctccggattataaaacggatctcctcccgaaaaagtaaccccgtccagcaatggattggctttaatttcccgaatgatcgattgaatcctttcctccgtcagcagttctcccgcccgcggattccagctctccggattgtgacagccgacgcaatgatgagaacatcccgcaagataaatcgaataccggatgccttcaccgtcaacaatcgtttcgggataagtcgataataagtggagagctgaaagtggagaattgagagtgttcatcttaaaataaaaattaaagtttcgcatgtgctgtatcccgcatggattcccctccttccagaaggaggagaatccatgcggaaacaatttacgaaacttcagtaaaaaataaatgagtgtctttcaacttctacaagtgcttcacgcgatccttttcttccgcccgtttggcagagttccaggagctgaggtcacctgtcaggtatccggtgatacggcgcatgcgtaagatgttttcgctctggcataccggacatttatcgaagattactcctttgtatccacagttgtgacaggtatccaccgggtgattgatggagccgtagccgatgccctcgtcgtgcatgaccttcacgattttcgcgatggcacgtacattcttctgagcttccccgtccagttccacatacgtgatgtgtccaccgcgggtgatggcgtggaaaggagcttcgcgcctgatcttctcggtgatgctgatcggttccttcacatccacatggaaggaattgacgtagtagtcgcggtccgtcacgccgtcgatcttaccgtatttccgtcggtctatcttggtgaaacgtcccgaaagtccttcggcaggtgtggcaagtacggaataattcaggttatatttctctttatattcgtctaccactttgttcatttccattacagcttcgtacagcgtgtcccatgccttctggctgtgtccgtggccttctccgtaaagtgccaccattgcattgtgtccgccgataaagccgatgcccagcgtaccgctgcgtaacgcatcgcccacttgctcgttcggattcagtgcgccgccgcctttccatacgtcatttcccatcatgaaggggaactggcgtgccagtgcggtgcgttgatactggtagcgctcgtacagttgatcggctacaagagtcgccatattgcggactgactccatgaaaatctctttcgctttctgttcgatggcatccttgttgcgttcaccctcaatcagattttccgccttgatgcgtgcttcgatggcgaggcgtggcatgttcaacgtggtgaatgaaaggtttccgcgtcccagagatgacttttctcctgccacattctcaaatacacgggtgcggcatcccattgtagccaactcgtagatataccgtttcggatcgtccgctttccatttctcgttcttgttgaaaggcgtgtccaggaacatgaagttcgggaaaagcgctttcgatgtagtctgacaagctcttagcagcagatcgaagttcggagcttcgtaagttccccgcatggcgtcttcgatgttttccgcacccatcgctttctcgaagtccttttcggagtaagaaactccgtcctttactttgaatatctggatcgggaatacggggacttcgccacgtgttccgagtccttcgatggtggctttcagcagttcctcgatcacgaggcggccttcggcggaagtatccgttccgtagttgatggagctgaataccacttggttacctccacgggagtgcatggtgttcagattgtggataaatccttccattgcctgatgcgtatccttctttgtctgctggtacgctttctctgcgatgcgtgtcaggtgttccttgtcaataatgatttgcagggctatcagggcgatgcgcaatgtctcgcgttctgcttcggtcgatttgatagaaggtagatgttccttgattaaggtacggattgctttctcgtccgcctgtgttccgttttccatcgccacgtagaagttgatgaacgaagccagatgtttgcggaaagactttgccaccccttttgccatgaagaagtcgaaggcggggattgcctgtccgccgtgctgctcgttctggttggtctggaagatgatggtggcaagcgtagcataactttggatgctttgcggtgtgcggatgctgccgttcttggtgcggaagccacgttcaaagagatcgtccatgtcatattggatgcaggtggtcgtctttgtcgggtagtaatcgaggtcgtgaatatggatatcgcccaactggtgcgcttcggcaaaacgtttcggcaacagatatttataggtatagtctttggtgacttccgatgcgaatgtcatcatttgtccggcaggcgtgtggctgctcatattggcgttgctcaggttcacgtcgttcttgtcgatggcgacgatgccgtccatcacgtgcttcatctgggttttcttgtcccgctccgtgttccgccattcgcggtagatgatgtacttcttggctacttcggggcgtaccttcatcaatgccttttctactaagtcctgaatttcctccacggtgatcgtggggttagtgaactgactgattacactcatcgtgacgtcagcaatcagttgctgctcgtcctgaatccctgtcgcactgaatgctttaccgatcgcattcttgatcttactgatagagaaatcttctcttttaccatctcgtttgatgatacaaatttccgcgtagttcataactttaactcccgaaagtgattaataatatgtttatttgactccggcaggtcttctgacttatccctcccccgcagcgccttcccacatctggatgcagtgacatagtgtgcggattcacagagaattacagcagcgggtactgtcgccgatttgcacagcgttccctcattgactaaacctctttttagttccgaaaccggatacaaagataaaggatattgtgatagcttggataggatttaacattaaatttcgggaaacttttctttctgcctgatacagaaagttttccgttttggataacttttaagaaatgattcttgcaggaaatattagtttttcttctctgttatattgaaatagtcggactctcttttaagtgtcccatgccccataagtgtacttattaaaggactcacgcttttatcagacttaaaaaaagatagactaaatgaagattttaaaagatttgcatactggtagaaagaagttttccagagttgagcggatgcattttttgcaagagctggaagaagaactgaaagtttattatctctcctatacagagacagtagataggccttattccgaacaggaacaagagattattgtccggattatcaagatgctgattcgtcagcttcggggtacatccaagtttcagttgtttagcaggagaggtacaagacgtaagtccgaagatccggatgatgtggaagagcgggaagagcggcgaaaggaacagacagacgagatacgtttgaaacataccaacctttactcgtacaatcctctttccaagaagtataaagcgaggaaagaagaactgcttcggaacctgaaaagggagttctaatcttccggatgtttcattgagaacgtccgggaagtaacaaataagagtagaccggcaaatgcgtatgtattgtgagtcccttgcgtttgctgagcctgctcttatttgttttagaattagccaagaaaaaataccctgacatgtaaatgttttagtttcatgccagggtaataatctaatagttattgttcagtcggtgacttttatcaagagaccgttttaacaatatgcaatgtcagtaacggacggaatatccgatatgatgtactccatacattctttactccttctactgctatcggattgtttttagacttttgaatgtatttcagcagaaccttccgttgctggcgattcaaaatgtctatgtttgtagcccatagcataagtccttcttccaacgttgtcacttcaaactgatatgaggcattgtaattacgaatataggtaatgaaagtaaaggttgctttctctgatagaggaaacactgtatcgctcatgtcggtttctatcatgtttacatcatataagtacattaacttgtaatatttcctatcgccacatccctcgtggtatttttttgctatattcgcattgtaaagagatattagatcatcaattaaaaagaaatcacgccagacgttttttacgcagtctaattttactgggccattgtcatgatagcattccagagattcacgaataagtaaagacttcatttttgaagatatatgagacgtgtcatgaactaattcacgaaataaatcattagtcggcatttctgattgatactgatgaacaaagcaatgcttatcgttggcattaactaagaaagtaaatgttttcataatttcatttatttcatggttgtttctgagacttgaatctaccctaatgtaggaatatattgttctatgctaggatgttttattagtcgttttttttactgtctctactatattaagaagcaaaagagtactaaatacaataaaacatgtacaccaaacattacttagaccatttaatttggtaggaggatctatatcaccatatttgatattcttcttaaatgacttcaactgtttatctgtaaaaaaatcgacattatttatccataagttcaaggcttcttctaatgtctttgctacatactgactaatgtatgtcccacctttatagtcagcaataaatgtaaatagtttcattttaattacctcctctacctctttgatggtcatggtctcctgcataatccatctgttttttatagtgatctctttgttttttcaatgtttctaattcttttttctctttcgcagttttatttgttttagattttaaattatcatatttctcttttgctgtactataatcatttgcagcttgttgtcttttatcaatattcgaatgcttttcattcttcccgctagactttgaatacccgcttccgttattactaccttcgctaactcttccttttttggagaatagcttcatgaatccacttgttcccatcaatgaaccgtgagtgatatcatacacgcctttcgcggtaacccccaaagaaattcctgcggtttccggactgagtgccattcctcctgcagcttcttcgaaaccattaacaatctctgcggctcctgcaaaaatacttatgatatcaccaacatcctgtcctgcgttgtaggcagatgcgttgctgtatattccggtttcacggagtgacgtttgtccaagcagtatgttatctgccatagcccgtgcagctccattggtaaaacttagagtacccttaaagacgttgcttaatcctctgcttattcctccccatgtgggccacattccattgggatctactaataggataggattgttcaaacagtaagtgtatggactaatcttatagtacttttccgtcatcaggtccatcgtatgccatcttcccaataccgggtcatactgccttgctccgtagtcgtacaagttcaatccgttctttgtatccagttcctttccgttatacttaaaaggttgaacagatgaatttgaagcgaatattcctccgaacggataatagtggttcacttcttctatcattccatcttggctggcaaccactctgttgtttccttgatggtcttggatgtagtagtggaactttttatctgctatagagaaatatccctgttcggtcaatagcttgtcccggcttccattttcatagatcacattgccgcagtagtcggttgtagtggtgtttcctgcgattatatgtgtagtttggagtttagttccgtctgcgctatataggtaagaaatttcactaccgtctttaaactgtatccgacgtggtaaatttaagaaattgtattggatatcagaaatgtttttattcaaatcttttgttaaattaccgtcttcgtcgtaggaatattccgtgtccagattcacaccgtccttgaactcgaaaccattcgcgtatgctgaacttgtggcgctgtctgtcactttcttgagctgattgcctgtgtaagtaagagataggtcgtcaattaatccgtaactgctttgtccggtttgcccataacgcttcagtcctgtgatgttgccatgtttgtcataaccggtcacttgttcattgaagtgatttgtattcgtcatcgaattgcttccttcactataattggcactggtcagcctgttgagcttatcgtatgaatattggtaattacgggtgattgactctttgtttgctttccacgtcatgctactgatatttccgccatactggggagtgccgggaccatcagtataatgtagcgtttgagagaagagagggctttcgatagacgttagccagttacggatattatacgtattggtcgttgtcagtgtggaagtgccgtctattcgggttaagcttttaatattgcctaagtcatcgtagagatagctcattttcgtagagtccttttcatttacgatttgtacagtttcagacaaacgtcctgcgtgattgtagctgtgtttggtttcttcgatcagctcggagttacttttggagtggatatgcttggtgtgcacaggctgtcccgtaaagttgtaagcagtgtatgtcttttcgtatcctcccagatgattggtcgattttatctgaatggcacggccgttataatcatagtaagtaacggtatagtcgtatcctgtcacagatccgtttttgtccagtcgagctgtcgcgtttccggtctgcaagccttgcgaactagtcgtatatctttctccgaactcgctgtttgcttcataattcaaactgctgttggaaatcagggtgccgttctgcatcttaaactgatagtcgtcataatatttggcggtaagcactgtggctgaattcagtgcgactccggttacggaataaccgagaagagaagcgttgttcgtacgttcacatttgacgcatgtattcagtatcgggttgttgaatgggtctatggcgtttttacaaatccccgtgatacattcgcgccccattgcgtcgggcaatgcgaattgccattcacctctttttcgttgttctcctgtttgggagaagataaggcggtctgccaagtcatagactttgtactcccaactgcagcccggtaacttggtgcctatgcaccggttacgcatatcatatttatagagataggcgtattgagctaaggatgcggaagtttgactcgaataactgctaccgcttacaagttgggcggataccataggtggaagcaccgcttttaaattatcgaactcatcataaagataataagtgtcgttattcgtcttactgccgttgttgtgctcaatttgccggctaagtactacttggtcgaatttattcttgaattccaatgtcacttgacgatcttcgttttcggtccgggtgacggatagctcggaagatttgcaattgccggctactttcagctccatgttttggttatctttttctgtcatttcaaaccgaaggcagttgagcgtatcatttccggcgaagttactcaggtagctgaatttggtacttgctttttgcgaacgccagtcgcttccgggaccatatacttcccgtactcttcccaaaggtgaatcttcgtagactttttctgaaaagtgataagtatattccttatagttaaaagcatagaaatcttgcagactttcggtaaacttccagtctatcatttctgtgttcgaaccttgtgcgtatggcaaatacgatttggcatcatctcttaacaagttatcataaacgatcggatggtatatactcttgttcttattggaagtacccacttctattttctgcgatggatatcccagaccgttgtagtaagtaatttcttttcttcccccacttcttgtgttatccagataattcgttgtggaaatatagttgtctcttccaataggtaatatttctattggaatgttttgaggtgactgtttgataatgaagtgtactggaaatgttgtttcgaatgttacatcaaaaaagagtacgacgaactcggatgatatgtctgaaattcctacccctgtgagccttaaacatcttcttaaatcttccgttattcttgaaggcacgagcctttcgatttctgcagtgaataagtgatttttgttttccatcgttactatccactgacctccgtattcgagatgtgaatctatagaagtcgttactctcaatcccagatcggataaagatatctctccatgtctactttcagctggcgttatttctatcggaaaatcctgaggggattctttgataacgaaccgtatcgtatctgtcggatcggccgttatgtgaaagtaaaggttgcatataccgtctgaattagaagtaaactcaactttggaaagtctcacgtacggacgcaattcttctgatatgcgtgaaggaacgaagtttttgatttctgcttcgttcaagctaaagttgttccttgctgttatcatccaagtatctccttcgtagagagtgctttcaggagaagatgtgacttttagccccatgttggtcatggatatttgcccggtttctgtcgccaatgcaggactggcgagtaagctgcatattaaagctgtaatataaataataattttcataaatttatctctttagaggttgtttgaatatttatatgaactaatcagttcacccttatggtcggtcttttttatcaggcgcccagaatcatcgtatttaaaataggtagaaacattcttgggatctctaattttactgatacctatgtatgggatatattcataagtagtgataaatgatgccggtaattgcgttctcaaatcttcaactttctgcatgtctgaatagctgggcttcgttgcgtctgccagtcttttgataagatcattccccaacagtcctgtaactgattcgtaatcgctgttcttgatttccgcaattgcatatttgcctttgtatccgtacaggtagacagtttctgttttgtctttttcgttacggatatgagtcgggttgctgtaagagtcgtatgccaggtatgtggttgcgggaatattagaaacatcggctactaactcgttgcccacattatggagtccttggtatgttgcagcatcagcatgttttcccagtatggatactttgtctttcactaagcttttgctgtctgcagtcagtaacttatagaaatatgtctcattctcagttacttttccgttttttatctttgtcacttccaatggatagtcggtgaagtgtagctgattcatctggtagaaagaactatagggaggtacaaatggaaatatcagcatgtccggcacgtatcgcgtcttttcttcgtatacatttccggctccgtcttcactggttttcagctttatctgtttgttgacggagttatattcgtatttatctttatactcaatagtgtttccattgtcatcgtaagtgatagtccgtttttccgaaagtaggttgctgtagaatttttgatagtaggtacctccgaaagcaaacctcaggaatcccagtgtagggtcgtctgaattatagtccatgacattagtagtggttatctccgtgatgagtatggaatctttctgtataggagtatattcgaatagttctttttgtttcacatgaccggcacagtcgaattgttctttacttaagagcattccgcgctttagtgcgtttgatgaacatggagtgtatggactataaggggtaccgacatgaggagggtattcacgggagaacttattattcaacatagctatgggatcttcgtccatataacctggtccgaaattgctgaatgtatggacagtatatccgtctatcagtttcccatttttgtcttcattgcactctatgactttagaatatccgatatactctccccgactgttgtaccagagcggattggatgcttgagacatgatggcattcaaggtataatattcgggtcctccgttttgtgatttgaggagattgtatagctgccaaccccaaaggtattgtggagtgaaagatagaataccggaagagacacctccctttgttgtcggtgtgaattcttttgtgtagtaatagtgctttcttgtcagtagttcatcattgctatcgtagttgttgatttctttgatacggagacctcccggatatgtataatctggagtgcctggataaggtaaatgggcactttgtactgttttccggtctgctgacaccatactggatatgacgttgggttcataaatgaattctgttcttccatgtgtggggtatgtgatggattttagcatttctgcagtcacacgaaatcctcccttgtctcccattcttttgttggtatactctttgccttcggctatctgcttgtcagcaaaaattgcattttcaaagaactctttgctgaaatagtatgagaaattttcaccgttattgaatccgaggttgtcatagtgtcctgtattatatccgggtaggtgattggggaaataatttagtgaataggtcgattgggttcctgatggagtcgttttagtcagtgttttcagttttaatcgctcagtggagctattagtgtaagtaaactgatagtttatcttatccaatattaccacggagtttagcttgtttaacgtgaaattcttttcttttgtaaaaaatgtagctggcccatggtccatacaggtttcccatgcatactgtgagtcatagggtaattgtgtacttggggagtaatgaaaccgggcaagtattttattgtctgttacatctttgactgttgcaagttgtacaggggctagtaattcataatcataactcattgctgtttgccagaatagagcatccaagcttatacagaaagacatatttccatttatttgaaacggcataatttcgtaggtgaattctatttcatgtcctgcaggagttatgattttggagagatgccaggtgatgggagcaggaaggtttaagaatcccttgaaaggtagattgtaatctgttttatcggttcctccaaatatgtatttataaccgtctggcgtggtcagtgtaaacgaatcaatcaaccaacatgataaagggttcttaaatccggttccttctgatctgcaatagttgtaaaattgagaaagtggactggtaagttgagaacgggtattattgtaagtattcgaggtaaattcaattttgatgtcagaatctgattgaaccatccacttgctcttttcttgactatacataaagcttccggtgtaaccgagaaagttaaattgatactcgtcttgggtattaatatagttgccggatactcttactagaatgtctgctgtggttaataaatcagcttcggtggttataggcttgtattcattgctagaactttcataagaaatatctggctcatttttaattatccgggtaatacatcctccgcattcaaggctccatcccaatcccacttcactgggtaggttgttgggttttacattataaatatgataattgaggttgattggaagttggatattatctcttaacttaaattcgtacaatgggatagagatattcggagttccggtatatagtccgacaggtattttaccttgagtgttggcattactgacacccggttgtggaaagccttgtgcccctgtcaacccaattactttctcaaattgcccttgcgctttcaggcaattacttgccaatagaaaagctatggtgaataatatatatttcattttcattattagtttattgatttttgtatactaagtccgccacaaatatttctgtatactgctgtggcagctgaaacagatatcttggtggcggacctcatttttgactttcttacagactcatcgcattagcgcccaacacgcctgctactgccgaagccaccgcgatgactactttcagaatcatatcccaaagggatttcttcattgccataatttacacacctcctttccgatactttaaaagattaattacttcctgaaaacgtctttatacctttgctcatttatattgtcctcacaggctttcctttacctcaaagcaaggacacgccttgatccactcttccggttcgatctccccatctccgttcagatccggactgagatcccggtgtccgcacacccggcagccggggaaacgttgctccaattgatgcaccagcaggcggagggcggcacgttgttccggcgtccgtgtatctgccgggcgtccccggcagtccagaccgccttcatagcagattccgatactcgacgcattgaatccttttgcatgtgccccgatgcgttcgatgggacgggtgagaagtgttgtcccgtctttgcggatatagtagtgataacctgttccgttgaatccccgtcgccgatgcagcgtctccagatcaaaggccgtcagtgtccggtccacccgtgttgcggaacagtggatcacgattaaatcgatctttctcatgattcgtcagatttgataaatacccggtttatgattgccttatacggttgggtccggagcttcttcgtcaccgtcatcggggtccggtttgggtttggggttttccggatcggtcttgtctccttcgctgctttccggtttgtacttgctgtagtccagcgttttcagtgcgtctttaatctcctttccggggcggaagcggacacgggcacctttgatcaatccttctttcacgtccttttggacgagtacgccattgctgcgcaagttgacatagaacgaaccgatattccccaggcggacgatctctcctttcttgaaactgtcgatcatttccgtctgcagggcacgcagcacgcacactacgtctgcccagttcacggtactcgaacgctggatgcgttctgccatttcatctatatcgatctctccgctcgatttggcgagagcgtaatacaggtccggcttgtctttttccatcatgttcttgcggagcacgctggtgaatgaaaatacttttgccatttctttactggttttaagttcttgaataaatgataataaagtgttgcgtcacaggtggttccttgcttgtgacatgacaaaagtacggcggtggggatgggcgatgtctgtatttgtccgcaggtgtccgccgatgtctttttttatccgtaaatgtctgcggatgtctgttcttgtggtggtttgaggccgggattaaaaagaaattccctgatgcaagctgaataatactgttcagttcacatcagggaatggaacgattcgttcctgattggggtttaggactatgttatgctatgtcttattctttattgtctatgtcttgtaggtcccggctaagtttgttttccaactcttcgatactgggaagtccggatttgatatctttcggcagggcttgaccaagttcataatcggagattcctataggtttatgtacatcccgtaaggcgtattccgccataatctggtctttgttttgacagagtagcagtccgatggtcggattgtctccctcccggcaaaggatatcgtctacagccgagcaatagaaattgagtttgccgatatattcgggttgaaattctcctctcttaagttctacgaccagatatctatgcatgaaggcattgtacataagaatgtcaatgtagaaatctttttctgatacttcgatatggtattgcctgcccataaaggcgaagcctgcacccatttcgacgagaaacttctcgatatgttttataaggcccagttcaatatctcttttgtcgtactcttcggtgaacgtaagcatatcaaaaatataggggtcttttaatgtctcttttacttgcttggcttgtatttcgggaagagtggtgtcgaagttactagccaatgctccgtgagaatggtaatagtcttgcttgattgcctcgataaggaaatcccggctccaaccgtttttcaggcattggatcatgtaccagtagcgggcttttatgtctttagtgcgttgcattaaggttatattatgtgaccaacctaatttgctgacaggtaggactatttcattattgttcaaatacgaaacggcccgtttcgtatttgtaagttgctgattatattcattatagaactgtatcatgaactggcagttcctgacagagaatcctttcatctccggataatcattcttcaagtcattggcgagcttctccagggcattgtttccccaacctatttgtttttgactctcggacagtagtttgccaatatcccaatacattgaaagcatttcttcattggctgtgtaaatcgcctttttttgtgctagtagtactcttgcttttacttgtttgagtagatatgcatagttgaatgcatggttttgattttccattttgatttcgtttgttccgctaaagatactacttattattggttaatcgctccccctgttctaattattttctttgcttgtctgtatttgtccgcaggtgtccgccgatgtccttttttatccccaaaagtccgtatttacttcaataaatagcactgattattttacaaaacgaacttttattagtacctttataccattataaaatgctaataaaatgagattatgaaagaattaattgaagagaaaaagtttgaaatgagagcctatgacaaagtagagctggctctgctttattgtccgggacgttcggcagagtcagctcttaaaacactgatgagatggatcaagcaatgccagccgttgatgcaggcgttgggcggcatcggatataatgtgcggcggcatcgtttcctgcgtcaggaggtggaacagattgtccgtcatttgggcgagccttgaaaaaagagagaatgaagttctttatctctgctgctgttcatacgtctacttccggtttccagtatatcattcagcagattgttgtacttctctttctctcttcatgtatatgtctttcttctttccagtacttgatggaggcagtttcagtacttcttttccctgattcaagtacttgtacttctcggttcttgtacaacctttgcttctttcttgtacttgtttccggtacgtttctgaactctgtcgttacttcgatgtacgttttctataccaatttatcgggcgttttccgttactgccactgccaactgccacttagcgcttatttgtcagtgaattcttttattctgatatatttatctgtttgtttctcaatgtattttagctcgatgaggctttttagatatctacaggtacttcgttcgctgataccttctgtcagtgctttctctttaatctgtttgtaagtaaaaatcctaggtaggctctctacgaccgaccggattcggaagtatgactgcataggctgaggtttcattttctctcccggcagtgaggaggcgaccagcaggctgtggttgaggatggtttgtacgatctgcatggaggcatgaaaatcctcgtctgtacagatgtattccttcatctgcatggcaccttcatacttgcgcagggcggtgaagatggaagctatgcgtgccaccatcagtgcgccacggagtacgatagagcccggcgcgtccgcttgttcgctggccacttcgttgagcagacagtcgaagtaggcggtatgttcctcccattgtctgtcgctcagcgtgacttccgtaggagattgttggaagaagaagtacatctccaatacttccttgccgaatcccttgtagagtgtgatataatcttcctgtcctttgatgggggccgccgaacggtatttccatcgtgctccgcaggtgtagatgccgaaacggcagtaaagtccgttttccaaagagcggataaagttggccagttggctgggggtgccggacaggcagagtgccaggcgcggtacttctgcgcagatgagttcgccgtctaccttatagtccgtggctaccggttcatgatggtaggcggcacggaacacatcgtcgtgcttgccgtaatcctgcttgatggcgccggagatcatgtccaattcggtagcacagataatgagtccgaggtctccgttgattttcagccggcggataatttggtttctggaagtgctgggggcaccgcagaggtggtaatattccggtggttcgggcatgggagcaggggaggctgctgtagatttcgtcccttttttgatttgttggttggttcgttcccattccgtgagttcacggtcgtaggcatcctttttccgtttgttttctcctttcagataattctcgatttctcgtgggagcatgtttgccagtgtgagaagtcctttaccggtggcggggggagcaatgatcagggtgtagagctgcggactgtaaggacgctggtcgaaactgatgcggacttgtggcaggcatccgctcaggttggcgatcagtcctagaagcagtatatcgcgttcgcgtttgctgcgtgccggtttcatggctcttttcagaaagtcgggaagatggtcgtatacttggttaggaatgcagggagtagatcctcgtaattcttcattttttatggacaactcttcttctttccccgattcatttcccacagaaacaggcctaaaggtgtcagttgtcagtgttggcagtgaattgtgggtctcttggggtgcataagatagatcaacgtattgatatccagctgataagtcttttctgagttcttgcagcgtgtagccgtttctcacgatctctactgacataacagatgttaatttttcaaggtcttcttttgaaaatcccttacgtcgtgcgcttcttcccattgctagcatagactcgtggcggttgcctttctgccaggggtggtaatgggtgaagttacgggcgaaggtttcgatgtatccgcaggcttcggtagcgggagggaagggggaggaggagccgttactggtggtataaggggtgccgttgctgcctggaaggtttcttttatccttgatcaggttggttaacgaagggtcggtgtcgagttcttccctccacggataaggttcgggagtgggattgtagtaggcgtcggcatcccatacgcaagaacagggctgggtgatgcgggcgcattgttcgtcgcacggatgcccggcgatgcgttccagtgtctgctggcagatggcgtaggcgagaggatactcttccggggtgcgggcatcgagaaatacgacgactttgaggcctctgtcggagatactggtctgcgtgtaggccacgtaggggagagcacggaaaagggctttgacggcagatgtccgttcgttcaggtggtcgaggtcgtacatggctagtcggctcatcttttccagattggctgcggcatggctgcaatgcgggcggcagatgccctcgatgatgacgacaggcatggcgtcttttaccattttggcttcattgctgcggtcgggacggtcttgtagtttgcggtagcattcggtctgtgctttccaaagtgtgccgatggtttgcagataaaggttgtgcagggtgattatggtagactccttgctccaagtatttctaaaaaaagaaaattgaaattgtaaattttcggtttgtggtaagctttgcttttccatactatgtttttttgtttttattgataaatgatagtatgagataaagaagggagaatagtgctttcactattttattgagtgcagaatagtcggttccttaagtcggctgcaaagatagaccgggtgtaaggaagggtgaaatgttaaaaaggtgattttcctatgtgctatgcttggtttttatctggttacaactacttcaatgtcgtaattgatgaaaagtccgctttcaataacgcccgtgattgttttcagctgttcttccagcgaagcgtcaatataatggaaacgggtatcaaggataaagtttccgttttctgtcaaaataggaccgtcttttccgtgggcggggcgtagtgatatttcggaggcacccagtcggcgcagttctttttcgacgtatgacagtgcatgcgggaacacctctaccggtatggggaatttgcttcccaagatattgacaagtttgctgggatcgacgataatgaaggtttttccgctgcttctgatcagcagcttttctttgaacatggctccgccacgtccttttatcaggttgcggtcggggtctacctcatccgctccgtcgaatgtccagtcggggcgtttgtcccaaagggtggtctgcgggatgcccagttgtatgcaagtcatggagatttcctgagaggcgggaatcacttccagatataggtgctcttcgtgaatccgctttgccagctcaaacaaagtgaggtagacggtggaaccggagccggcccctatcacatcgcctgttttggctgtggcggcgatctcacgtgctacacgttctttcgcttctctgttgataatctcattggaccattggaggtctttgatcaggtgattttcccagttcatggttcttgcagttttagagtctctatttatataacgaatgaaagggagtgtttggttcaacaaaaacggaagaattaaaaaatagatggatgattggttggaatatagtttttaatatctatatttgtaacctaaaggtttctttttggaacctatgggtgaaacttaaaaataagaatatggactaaattctatggttatggaaaatattacgattgagaaaatggagattaaaaggtttaatgctcttttgatgcggacgattgtcggtatgttgtttatgggagtattaatgtgggagacattttgtcttgatactggcagaaagggatttttgggagagacatggtatatatttgcatttgcagttttgctgtatgtcgttgtagcgataagagcttccgatattttggagagaataaagaaagataagaaattaatgggagcattagatagtgaaatatattcggactataattctaaggctttgacagcaggcttttatgcagctatgcaaatgggattattagtttattgctttggagatttttttaatctctcggtacgtatgggtgctctggttatagtggtggtagctatgcttttctcagaaataagaagattgcttctgtataatccctataaagatggaaaataaagaactgctcaataaaataaaggtctacagggcgatgaagaatatcagccaggaagaactggctgtagccattggagtaacccgaaagacaatcaatacggtagagaccggaaagtttattccctctactgtccttgcgctgaggatagcacgttatttcggggttccggtggaagaaatttttgtgttgaatgatgaagcatcgtattgaaatgatgaactctgcctgacggctttcttttacttacaatatcagccagatcgctatgatatgccctatgcttcctcccaaacagaacagatggaacgtagcgtgcatatatggcttgcgcagcgaatagaacactgccccgatgatatacgaaactcctccgcctatcagccaccaaaaagccggaccggctcccatctctgctaaatgatccatcaaaggcttcatagccacgaggatgcaggctcccatagctatataacaagcggtttccagattactgtgttctttcagtttcttgaaactcagtataaaaccgacgatagccgacagccagacaaaagagaaaattccccatccccaaccgcctgcgtgcctcatgacgagcagtgtaaacggagtgtacgtccccgcaatgtgcagatagatagccccgtgatcgaatttgcgaagcaattccttcagcttacccggacggctgccgtgataccaggtggagctgacataagaagacagcatgccaaacaggtagacggttacacaagctaccgcccacttcggttcggcacccgccgccgctttcgcgagcaggaaatagccggctatgactccaagcagtatacctgctccgtgactgagcgtgtttgcccattcttcgacgttattgtatcttttattttccaatgtttcctttcggctttggttagagccgcaaaggtacacttttattttttcttgaaagccagagtgattttctttttaataggttgggttttctttctaaaccagttttccttcgatgaaggtggagctgattcgcgttcagctttgattgattttatcaaaaactctttcatctgattggctggtgggtatatccatacaaattcagagtctctataactttggtcagcttccgaaagaaaactccaatcttccgtgtcaaagttataaaacccaagattggtttctccgtgttcgtcacaagtcagtactatgactgaaaactcttcttcctcatgtctgggaagttctttctttttgtatatcttcatattctctttattataattttgttattaaattgttttgctacttgttttcggaaatcaaggaataacgcaagctggctgacgttttctttcagtgtcggattgcgtccgttggagtaataaggtatctggatgtcggcatacgccgttgcggtggtgtcgggagcaaagctggtcatggtgaactcttccttggagggttttccgtacttcagattcggtttgatcgtgttaccggactgctgtgaaaaggtagtcgatagcaagcataacagaaatgttgagaatatgaatagtcttttcatatcgggtgtgttttgtcttctccgacaaagataaaaaaaatagagaaaggtgtgtctcctttctctatttttatttcagttatgcggataaaagattataccaggtgtccgatccactcttcgcggtcgcccggaaggaggtcgatgacggggacttctaccatggtgtagcatcccggttgctgcttcatggaagcgcgtgccacgcacacaagtacctgtgcggtcagtgccggattgttgatgcgcatattgaactcgaacagctgattctgcgttttaccggaaactcccttgcgagtcagatttacaccgtgtcccatatcgagcagtgcgtctacgctgggcacaagttttacatgtgtctcgtcgttcacgaagtaagggtctgccttgatggctgcggctacttcttcaaacttgtatccgtctttcagttcgatatataccatgcggcggtggattcccgttccggtagggatcgtcatggagagggcggctttcactccgtcgatcgcttttacggctacggtgtgtcccatactcatgccgggaccgaagttggtgtaagtgatgcctttcggagcgattgcttcgagcatggtgcgtacgatcgagtcgcttcccggatcccatcctgcggagatgatggatacggctttgtgctctttggcggtggcatccagcgtgcggcgcaggtcaacgatgcctgtgtggatgtcaaagctgtccaccgtgttgattcccattgccaaatattctttcgcgtatttctcaacgctgcgggtcggtgtgcagaggatggccacttccactccttccagctctttgatatctttgactactgcatagtttgctaactcttccggcttgttctctgctcctgcacgacgaactactccggctatttcgaaatcaggcgctgcctgtagcgcttcaagtacatagtgtccgatattgccgtaaccgacaatagctgctcttacttttttcattcttttattggttttatatgaacatttttctttaattctgccacaaaagtaaacaaattactaggaagttttgtttactgcctgcattatttttaattttttcacctctgactgcgaggcggaaatgttgcgaaagtcttttcatctgtggtgaatttgtcttatctttgctcacactatgatagaatatgtaagaggcgaacttgccgaacttagtccggcaaccgcagtaatcgactgtaacggggtaggctatgccgccaatatatccctgaatacttattcggctattcaggggaagaaaaactgtaagttatatatctatgaagctattcgggaggacgcgtatgtgctctacggatttgccgacaagcaggagcgggagattttcctgctactcatttccgtgtcgggcatcggaggcaatacggcgcgtatgattctctctgccctttcgcctgccgaactggtgaatgtgatcagcaccgaaaatgcgaacttgctgaaaacggtgaaggggatcggactgaaaacagcgcagcgtgtcattgtcgacctgaaagacaagataaagacgatgggagccaccgtggcaggaggaagcgcttctgccggaatgctgctgcaatctgccagcgtagaagtgcaggaggaagcggtagccgctctgaccatgcttggctttgccgccgcgccttcgcagaaagtggtactggctatcttgaaggaagaaccggatgctccggtggagaaagtaataaaactggctttgaaaagactgtaaaaaaggtagcaagtaataggtaataagtaatagggcgtggagaaactaaaacaagcaacagaataataatgaaacaagggaaaatttatatgaaagcatggctggatcttcatggccgtgcaaaggtgttggcgacggatcactggtatcttgaatttgccaatcttttattgcctgtcgtcagcgaatcttatttatataagtcggagacacaggaaagccagaatcaggtgactctgatgctgactctttatctggaagactgtgtgacggacggaggcaactggcgccagttcatccgttggcataaaaggaattacggacgttacctgccgttttatgaattgtcggaaggttatctcaccgacgagatcaataaagaggatatcgctttcttgctgtggggaattaattcgccggtaggcgatgactttgacggtgtggagaatcccttggatgcggacttgctggagtttgccgatgtgatctatgcgcagttggaagatgttttcgagaaagcgcctatcagcgacggacttgccggagactggctgatggaatcggagctgatggagaagcagcggactgctttgcctgttgcctcgccgggcgatcagttgcccgtgaatgtggagcgctttctgaaagcgagtggtggcgagccgttgatgttcttcgattcgtatgaggctttgaaactgttctttgtgcaggccctgcaatgggaggacgaggaagatgctctgttgcccgacttgaaggagttttcggatttcgtgatgtacgctaatccgaaaggtttgctgataggtccggacgtagcccgctactttgccgacaaacggaacccgctgtataatgcggaaatggctgaggaagaagcgtacgaacttttctgcgaggaagggctgtgcccgttcgatctgctgaagtacggcatggaacatgatctgctgccggaagcgcaattccctttcgagaacggaaaagagctgctgcacgaaaactgggactttattgcccgctggtttttgggtgagtattacgaaggagaatgatactttgttaagttatgccaatcaaaaaaagtaacaatccgttcgccggaaaggcgaagcctgctgccggaaaaaagaaagggacggggaaacggataggtaagtcaaaggtggagaaggctaataatcagttgaataggagagtgaaataagcctttggagactgcgccctttctacctgtcaggctacgccgttttatgtaggcaggctacgccgttttaggatgctggtttacgccgtttctccaaggtaaaagggtgcgagcaagaaaacaatgctgcgtctctttaaagttggaatgaaatatcattactatttgtgcctaatgataagtcggagaacagtctcttgaattgaaataaaaatcggtaagcgatgaaaaaataaatgtgctatctctgataaacacaaattttcatcgcttaccgttttttacttatccttttcggactgcttgatttattcttctccgatagcgcttttatcacttttccggaaagccgttactccgaaagaacctttattcttcggcagcttcttccatcgctttccgttcttttttcttattgataaatccgattttcagattggcgtcttcctgttctttcttgatttgctgcatggcggaaaggattttcgacagttcgtaaacgcctgctactgcctgtcggtcggtcggactcatcgtcgttgtgtatctacggtcgccgataaattccacacggacattcttgtccttgttgaggttcagaaattcgatcacgttaccgtcttctcccaatttgtaatcggctttttctattttctcgttcatatccgatgtttcgtagctgtccttcgaagtcggagtttcggcaaaactgccgtcgggagtcatcactttgacgcctacatgatggatattgccggctccgcaataaatggaagtcatgctcataattccctgctcgctcacttggaagcgaaggaaggaacgatggagattcttctcgatggcttgtgtaggccatatgtagttacccacttgctgatattcggcatctttctccagggtgtacttgcctttgatggcgtcaaacgctgcttgctttgcctggagagcactgtccagaaaggccagaatctcttgttgagccttgagttccacatccagcatcaattcctgaccggctttgcgggcctcgaatgctttgggatacaaaatcttgatactgtcgatttgtgtctttgcttcttcgtagtcgccacgttcgtaggcagcacgggcaatcgtcagtttttcattggcttttttctcgatgccgtttccgcaggctgtcagtgccagcgtgccgcaaaagaagataatcagttttttcatcataccatttacattttactattagacgatttgcgatggagatgggacgtgcagtgttcacgacttaccgccaactgttcgttacttgcggtttgccgttcgtgttacttgccgtttaccgttcctcgcccgttcatcgtttactttatagcgacaaaaatacaaatatatcccttatttttgtaattttgccccctcaaaacttgtattggcaataagtgtttgatgattatggaccgcccgaccggtgttttcatcaactatttaactgtctgttgccagtcgttaagcattaaaaagatgatagagttgactcaagaggaactgaaacagtattttagcgaaccgatcttcggacacattgccgaaaccgctgacgcactcggactggagtgttacgtggtaggcggttacgttcgtgatatttttctgcaacgtccctccaaagatatagatgtagtagtagtaggcagcgggatcgcaatggcggaagcacttggaaaacgcttggggcgtggtgcgtacgtctctgttttcaagaatttcggtacggcacaagtgaaatataaaggtacggaagtcgaatttgtaggtgcccgcaaagaatcctatcaacgggattcacggaagcccatcgtggaagacggaacactggaggacgatcagaaccgccgtgactttactattaacgcgatggctgtctgcctgaacaaagcacgctttggcgaactggttgacccgtttggcggcatggcggacatgaaggaaaagaccatccgcacacccctcgatccggatatcacgttcagtgacgacccgctgcgcatgatgcgttgcattcgctttgccacgcaactgaatttttatatcgatgacgatacgtttgaatcgctctgccgtaacaaagaccggattgaaatcatatcccgtgaacggattgcggatgagctgaacaagatcattctttcgcctatcccttcaaaaggctttgtagaactggaacgaagcggactgcttccgttaatttttccggaactggctgccttgcagggagtagaaacacgaaacggacggtcgcacaaggataacttttaccatacgctggaagtgctggacaatatcagcaaaaagacggataatctttggttgcgttgggcagctttgctgcacgatatcgccaagcctgcaacgaaacgttgggagcctaaagcgggctggacgttccataatcataattttatcggtgagaagatgattccgaatattttccggaagatgaagttgccgatgaatgagaagatgaagtatgtacagaaaatggtcagcttgcacatgcgtcccattgtgatagcggatgatgtagtgacagattctgccgtacgccgtctgctttttgaggcgggggatgatatcgacgacttgatgacactttgcgaagcggacatcacttcgaaaaacatggagcgcaagcagcgtttcctgaataacttccagctggttcgccaaaagttgaaagaccttgaagaaaaagaccgtgtccgtaatttccagcctccggtgagtggagaagagatcatggaaactttcggcttacagccctgtcgtgaagtcggtgctttgaaaagtgcgataaaggatgctattctggatggagttatccccaatgagtatgaggcagcccatgcttttatgctggaacgggcggtgaagatgggactgaagcctgtaaaatagcttttcttgttcaaattggagtggctaaaaagtcaatagtatctctattctcctccttcggaaaggaggagaatagagatactattgactttttagtcagccccaatagaggtagaaccgactttttagtcagtcccttatgacaattctataatttcttcattgcagttagtcagtttctcaactccttcgtttgtcactacccaagagttttcgatacctacagggcctacaccgggaagaacgattttcggttcgagagcaaagaccatgcccggttccagttcctgtttgatgcgcggagcaagtacaggcgcttcgttgatttcaagtccgatgccgtgaccgatgaacttggcttgctgtcccgttcccatgaacttatcggcaaaacctgcctgggtaaccatttcgattgcagtgttatacagcatttcgcaaggaatgccgggtctggcgatcgaagcgatcttttcctgaatatccagacaaacctgatgagcggtatatgcttcttccgacaatttgccgatagagaacacacggctcatatcgcccatatatccgttgaagttgcctcccagatcgaccataacactttgtccttctttcagcggagtcttgtcagcgcctccgggcaaggcaggatcgagtccgcgaccccctaaagcaaaatcgtagggagaaggataaccggcattatctccggtcagcacacttcccatgaagatttccatgctgcggccaaacacgcggaagatgccgaggcaaccttgaagacgcatcagacgttcgatttctatcgagaactcgatatctgtcattccagggtaatatgcgaacggaatctgttcgtatgccttggcatgcgccatgcccgaacgacggaacatttcgatttcgatagctgtcttcacgctgcgtgcctgacggatcagcggtgtcccgttcacgacttcagcgtccgggaacaaacctgccagacgaacatattcggtataaggaagttcgtcgccttccagcatcagtttagtgggcaaaggcagacctttttctttcagaatatcgacgatctgttccggcttgcggatggggaacgagtgttcgcctgtgatattgttgggccgcttgaaaaacagcagtgccggtgaatgaagagggagataaagatagccgctgactacacagccataggtgtagattaaatttgcattacaagtaatgagggcggcatcaatgccctgtgacaccatcagactgcgaatcttgtcgcggcggagttttaattcgggttgtagcattttttattgttattactgtataatgctacaaagataattaattccattgaagaaaataatgttaatctcaaaaaaatagcgctacccgcgtcctgtcacaggaggcgagcagcgcaaaccacaaatacaaatacaactaaacaaagtctcttttaaataacgccttgtcccatcatagcgtgagctactttcatgaatccggcaatgttagctcccttcacataattgatatatccgtcgggttctgtaccgtatttcacgcattgtgcatggataccgtgcatgatggcgtggagtttttcgtccacttcagcagcgctccagctcaggtgcatggcgttctgagacatttccagcccggaagtggcaacaccaccggcgttgactgccttacccggagcatacattattttcttttcgataaataagtcgattgcttccggcgtacatcccatgttggaaatttctccaatgcaaagaacgttattttttatgagattttgtgcatcttctccatttaattcgttctgagtagcgcaaggaagtgcaatatctgcttttacttcccacggacgcttgccttctacgaaggttgcacccggatatttttcggcgtaaggagcaacgatgtcattgcccgaagcccgaagttcgagcatataatctatcttttctccgctgatgccgtccggatcgtagatatatccgtctggtccggagatcgtaattactttggcacccaattcggtcgccttggtggcagcgccccaagctacgttaccgaagccggagatagcgactgtcttgcctttgatatctatattttttgcctgcaacatctgataaacgaagtacaaaccgccgaagccggtagcttccggacgaatcagcgaaccaccgaactccagtccttttccggtaaaggttcccgtaaattcgcgggtcagcttcttgtacataccgaacatataacctacttcgcgtccgcctacaccgatatcaccggcaggtacatccatgtccggtcccagatggcgccacaattcaagcataaacgcctgacagaaacgcatgatttcagcatcgctcttgccacggggcgagaagtccgaaccgcctttgccgccacccatcggaagggtagtcagcgcattcttgaatgtctgctcgaagccgaggaatttcaaaatggagaggttgacggaagcatggaaacggataccgcctttgtacggaccgattgcattgttgaactgtacacgataaccgagattggtctgaacttcccctttatcgtctacccaagtgacacggaaagtgaagatacgatcaggttctaccagtctttctatgatcttggccttttcaaattcgggatgctgattgtatatatcttcgatcgaaagaagaacttcttttactgcttgaagatactctaattcaccggggtgctttgcctccaaagaggacatgattttctggatgttcatgatatcatattttaaaaggttattctgataaaatgtaaactgctcacactgcaaatataggaaaatttttcaaatatgattggttttatggtgatattttgattaaataatgataaaatgatagtggtaggtgataggtaataagtaataggtaataagtaataagctgcgctgtaaaccgcatggttattacttgttacctattacttattacctattataaactttataaagaagatgatagcaaatgagatttaaaaaattaactttgcagggtaaacgtcaagtagactgtactatgaatcatttcattatggaataaaaaatagaaagagactatgctcagcaagtataaattaaaccagctttacttcaaagatacgcaattcgccaatttgatgacacggcggattttcaatgttctgttgattgccaacccgtatgacgctttcatgctggaagatgacggacgcattgacgaaaaaatatttaatgaatatacatccttgtcacttcgttatcctcctcgtttctcacaggtttctacggaagaggaagcattgacgcagttggagaatatgtcattcgatctggtgatctgtatgccgagtacgggagacaatgacagttttgatatcgggcggcacatcaaagagaaatacgaacatattccgatcgttatcctgactcctttcagtcacggtattacgaagcggattatcaacgaagacctgagcgcatttgaatacgtattctgctggctgggcaataccgacctgttggtttctattatcaaactaatggaagataagatgaacctcgaacatgatgtgcaggaagtaggcgtgcagatgatacttttggtggaagacggcatccggttctattcttccattcttcccaacctgtataaattcgtgttgaagcagagccaggaattttctaccgaagctctgaatgcgcaccagcgcacgcttcgtatgcgtgggcgtcctaaaatcgttttggcgcgtacgtatcaggaagcgatggaaatctatcgcaaataccagaataatatattaggagtcattaccgacgtccgtttcccgaaagtggaacggggcgagaaagacggtctggcaggtatcaagctttgtgccgccatacgcaagaacgatccgttcgtaccgttgattatccaatcctccgaatcggaaaactcttcgtatgccgccaaatacggtgccagctttatcgataagaattctaaaaagatggacgttgacctgcggcgcatcgtttccgataacttcgggttcggtgactttgtgttccgcaatccggagaccggagaagagattgcccgtgtgcggaacctgaaagagctgcagaatatcctgtttgccgtgcctgccgagtccttcttgtatcatatcagccggaatcacgtttcgcgctggctctattcgcgtgccatgtttccggtagccgagtttctgaagccgatcacgtggaccagtcttcaggacgtagatgcacaccgccggattatcttcgaggcgatcgtgaagtaccggaagatgaaaaatcagggagtggttgccgtcttcaaacgtgaccgtttcgaccgttactccaactttgcccgtatcggcgacggttcgctgggaggaaaaggccgtggccttgccttcattgataatatggtgaagcgttatcccgaatttgaagagttcgaaaatgcacgggtggcaattcctaagacagtggtactgtgtaccgatgtcttcgacgagtttatggagaccaataatctttatcaaatcgctctatcggatgccgacgatgatacgattctacgatatttcctaaaggcgaaactgcccgaccggttggtagaggacttcttcaccttcttcgatgtggtgaaatccccgattgccatccgttcatcctctttgttggaagattctcattatcagccgtttgctggaatatacaatacgtatatgattccttatctggacgaccgttacgaaatgctccgtatgctttccgatgcgatcaaaggagtctatgcgtcggtttacttcagagacagtaaagcctatatgcaggctacatcgaacgtgatcgaccaggaaaagatggcagtcatcttgcaggaagttgtgggaaatcaatacggagaccgttactacccgtctatgtccggcgtggcacgttcgctcaattattatcccttgggagatgaaaaagccgaagaaggcacggtgaacctggctcttggattaggaaaatatattgtagacggaggtatgacgcttcgtttctctccttatcacccgaatcaagtgttgcaaaccagtgaaatggaaatagccctgaaagaaacacagacccgtttctacgcattggacttgaaaaacgcagggcatgatttctctatcgacgacggctttaacctgttgaaacttcatgtgaaggaagccgaaagtgacggttcgttacgctatatcgcttctacttacgatccgtatgatcaggtgatccgtgacggtttgtatcccggtggacgcaaggtaatcacgtttgccaatatccttcaacacgatgtattcccgctggcacgcatcctgcaactggttttgaagtacggtgaacaggaaatgcggcgcccggtggagattgagtttgccgcgaccttgagccgtgaacaagataagacgggtacattctacctgttgcaaatccgcccgattgtggacagcaaagaaatgctggacgaagacttgacgctgataccggatgaagacgtggtgctccgttccaataactcattggggcatggcgtcatgaacgaaatttatgatatcgtctacgtcaagacggatggatacagtgcttcgaacaatcaggccattgcctgggaaatagagaaaatgaacctgcaattcctcaatgcaggaaggaattatgtgctcgtaggtccgggacgttggggcagcagtgatacatggctgggcattccggtgaagtggccgcatatctccgccgcccgtgtgatagtggaggccggactgaccaattatcgtgtagacccgagtcagggaactcacttcttccagaacctcacttcgttcggcgtaggctattttacgatcaatgcctttatgaatgacggagtctacaatcaggatttcctcaatgcccaacctgcggtggaagaaacgaaattcctgcgtcatgtccgctttgaaaagccgatggtagtcaagatggatggtaagaagaagctcggcgttgttctgatgccggggattgactgatctctttccggttgataaataaataaaacaaaaaagttctgctctcattggaaaagcagaactttttttaaatagttccgttggttttaaaccaacggggcattccttttaaaggaataaaaaaggatttttattctgctgatatacatctgtttactgttctgtcgaaaaaaagagcataaatccgtcgggaaatatgctctttctttgacaaatggttggttgttcttttattctttcaatgcttcttgcagatcaatgcccaatgctttggcgactccggcaccgtatgcgggatctgctttgtagcagttgcgggtgtgacgctgtttgatgaataattcggagtctcccatagcacgtgccgtgttttcaaacagaagttgctgttcgttcgccggcatcaagcggaacagatctcccggctggctgtagtaatcatcatcatattcgcgttcattataattgtatatttctccgttgccggatgctttgagaggcggttctttcatgtgaggagagtctttccattctccgtaactgttgggttcgtagcctttggttgcaccgtagttgccgtctacgcgcatagctccgtcacggtggtaagcatggaacgggcaacggggtttattcaccggaatttgttcggcgttcactccgaggcgataacgctgtgcgtcgccgtaagagaacagacgtccctgtaacatcttgtccggtgagaatccgatgccgtctacggtattgatcgggttgaaagcagcttgttctacttctgcgaaatagttttccggattacggttcagttcaaggattccgacatcttgtagcgggaagtctttgtgcggccatactttggtcaggtcgaacggattgatgcggtaatggtccgcttcttcttccgtcattaactgaatctggaataaccatttggggtaatctcccttttcgatgctttcaaaaaggtcgcgttgatgagattcgcggtctttggcgatgatcgcttccgcttcctgatctgtcaggtttttgattccctgcaaggtgcgcaggtggaatttcacccagatacgctggttgtccgcattgataaaactataggtgtggcttccgaatccgtgcatatggcgataggagtaaggaatgccgcgagggctcatagtgattgtcacctgatgaagcgcttcgggcagaagtgtccagaagtcccagttgctgttagggctgcgcatgttcgttttcgggtcgcgcttgatggcatgattcaaatccggaaatttaagcggatcacgtaagaaaaagacaggagtgttgtttccgactaaatcccagttgccctcttcggtgtagaatttcatggcaaaaccgcggatatcacgttcggcatctgccgccccacgttctccggctacggtagagaaacggacgaaacattcagtttgctttccgacttcgctgaaaatagctgcacgggtgtacttcgtaatgtcatgagtgacggtgaatgtgccgtaagctcccgaacctttagcatgcatacgtctttccggaatcacttcacgatcaaaatgagcaagcttttcaataagccatgggtcttgtaacatgacaggtccgcgttgacctgcggtttgcgaattctgattgtcggcaatgggacgaccgttcgcggcagttagttttttttcttccataaaatagatgttagtcggaggcaaagtttaaataaaccgaagtcttttttattcttctgtccgggtttataatatgtaacaaagatagaccgattttgcttgcttgtcaaactgataatttctatctaaagatagagaataactatgaacaatctttaaaacctccgatattttttatttcaagtacatctttcatccaagtcatgtacttcttttgcctttttcttctacatcatttgccggaatgaagtacttcctgtcactcactcttttacatgtttgcctgcactcttttacttgtttttcatcactgcggtacaacataaaaaaaactcccgtccttcctttcggaaggcgggagcctttatcttaaaaatgactatagctttcttatatcttgctgattatacgataccctgagccatcatagctttggcaaccttcatgaatccggctacgttagcacctttcacatagtttacatatccgtcggcttcagtaccatactgaacgcaggcttcgtggatattcttcatgatgctcttcagcttttcgtctacttcttcagcgctccagctcaacttgatggagttctgagtcatttcaagacctgatactgatacaccacctgcattagctgctttacccggagcgtacagaatcttagcgtcctggaatactttgatagcttccggagtagaaggcatgtttgctccctcagatacagctatacagccgtttgctaccaactgacgggcgtggtcgccgttcaattcgttctgagtggcagaaggcagtgcgatatcgcatttttcaccccaaggcttagctccttctacatatttgcaaccatatttctctgcgtattcgcggatacgaccacggtacaggttcttcagttccatgatgtaatccagcttttcgcggtcgataccgtccggatcgtagatgtaaccgtcagagtcggagcaagtaactactttaccacccagttcgattactttttcgattgtatattgagctacgttacccgaaccggaaacaagacaaactttacctttcaggtcagtacctttggttttcagcatttccatcaggaagtagatgttaccgtaaccggtagcttccggacgaatcagtgaaccaccgaattcgcggcctttaccagtgaatgtgccggtaaattcgtgagccagcttcttgtacataccgaacatgaaacctacttcgcggccacctacaccgatatcacctgcaggtacgtcagtttcgggaccgatgtgacgccacagttccagcatgaatgcctgtacgaaacgcattacttcagcgtttgacttaccacgtggagagaagtcggaaccacccttaccaccacccataggcagcgtagtcagtgagtttttgaatgtctgctcaaaggcaaggaatttcaggatggaaaggtttacagatgcgtggaaacggataccgcctttgtacgggccgatagcgttgttgtgctgaacacggtaacccatgtttgtctgaatattacctttgtcgtccatccaagttacacggaactgaaatactctatcaggaatacacaagcgttcgattaagtttgctttgtcaaactccgggtgtttgttgtattcttcttcaatagtagaaagtacttcttctactgcctgatgatactccggttcattggggaaccgtcttttcagatcgtctaatacctttgctgcattcataatctttttttcttttattggttgattaaatttcgattacctatttcttttatgcggttgcaaaagtaaagataaaaattgaactaacaaacattttataaagaaaaatgcaataaaacatcaaatttgatattttattgcattaaaactcagaaaaaagatatttatttattctttttcatcgacttatagacaggaataaagactaatgctgccgaaatgacaagcattactattgtcataccgtcaatacgttcggcttttgtgagaactaaatagcaaagcgccagccaaagcaggctgacgcaaactatttgtgattttgataacggccttctcatcggctttcgtttttcttcttcactacgatggcgtcgatcacggctacggctgtgatgttcacgatgtcgcggacagaactttcaaagtcagtgaaatggataggcttgttcagtcccatctggatagggccgataaattccgtatcggggtccattgcctgcagcagtttgtatcctgcgttggcggagctcaggttcgggaagatcagtgtattcacgtctttacctttcagacgggtgaacggatacttggcgtcacgcagttcgcggttcatggcaaagttcacctgcatttcaccgtcgatggcgagttccggatattccttctgcatatagttcaccgctccgtgcactttgacagggctgccggaggtatcggcgccgaagttggagtacgacagcatcgagatgaccggtgtatggttgaagaaacggactgtcttgtcagccagtttggcgatgtcaatcagagtttccgtatccggatgacggttgatcagcgtatctgccaggaagtaggtacccttctttgaattaagaatgtgcatcgttccgaaatgattgaatccgggctggatgccgattacttctttggcaactttgatggtgttgctgtatctggtgtagagtccggtgataaatgcgtctgcatctccggtttctaccatcatcataccgaagtagttgcgttcgaacatcttgtcgttggcttcttcgtaggtaaagccttcgcgggcacgtttttcggcaaggatgcgtgagtagcgttcgcggcgttccgactcgtccggatggcggagattgacgatttcgatgccttccaggctcaggtcgagttcttcggccagtttgccgattgcttcgtcgtttcctaataagataggatggcagatgccttcggcttttgcttcgacggcggctttcagcatgttgggatggatgccttcggcgaatacgacacgttgtgggttgcggcgggcggtgtcataaagctggcgggtcagtttggattcgtatcccatcagttcgcgcagatgcacgcagtaagcgtcccagtctttgatttccgtgcgtgccactccgctttccatggctgctttggctacggcacaggaaacttcggtgatgaggcgcgggtctaccggtttcgggatgaagtattccggaccgaaagagaggttgttgacgtggtatgctgtgttcactacatcaggtacaggctgttttgccagattggcgatagcatgtactgctgcgattttcatttcttcgttgatcgctttggcctgtgtatcgagtgcgccgcggaagatgtacgggaagccgattacgttgttgatctggttcggatagtcggaacgtccggttgccatcagtacgtcggggcgggcgctcattgcatcttcgtaagagatttccggtgtcgggtttgccagtgcgaatacgatcggcatgggagccatgctgcgcaccatgtcctgactcagtacgttacctttggacaagccgaggaatacatcagcgcctttgatcgcttcttccagtgtgtggatatccgtgcggtcggtggcaaaatatctcttctgttcgttgaggtcggtacgtgtcttgctgataacgcctttgctgtccagcatgacgatattttcgaggcgtgcccccagtgatacatataatttggtacaggatacggcagatgctccggcaccgtttacgacgattttcacatcctctattttctttccggccacttgcagggcatttaccagtccggcgctggagatgatagcggttccgtgctgatcgtcgtgcatcacagggatgtcaagttcttctttcagacggcgttcgatttcgaaacattcgggagctttgatgtcttccagattgataccgccgaaagtaggagcgattgcttttacggcagcgatgaatttctccgggtctttctcgtccacttcgatatcgaacacgtcgattcctgcgtagattttgaaaagcagacctttgccttccatcaccggtttgccgctcagtgcgcctatgtcacccagtccgagtacggctgtaccgttagaaataacagctaccaggttgcctttggctgtgtatttgtaagcgtcctgcggattcttctctatttcgaggcaaggctctgccacgccgggagagtatgcaagtgataaatcagtttgtgtactgtaaggtttggtaggaactacctcgatcttaccgggtttgccctgcgaatggtagagcaaagcggcttctttggttattttagccatggtattggtatttttattaataagttatcatttggctgcaaatgtaggaataaaagttatacattgttgtctttagatgataatttctattaattttatagcaaaatgactgattttgcacaaacttatggttgctatccgggtctctgtactccttaatgtataatggttatttcttttttctgattgctatataacatatctgttttgatattctctaggcgacattccttcatgccgtttgaaatatcttcctaaatacgactggtccgggaaaccgagccggtcggctatatcctgcattgtcagctccgtagactggagcagtactttgatctctagaatggcgaaatcatcaatgatctttttggcagaatctccggtcacactgcggcagatgcctgtcaggtatttggtcgaaatacaaagctcgttggcgtagaagttaacttcccgttgtgaaatgcagttttcgtgcaccaatgcgacaaacttcttgaagatttcgtcctgccggcttcccccttctatttcctgtttgtcgaagtagcggtagcatttatcgtaaatatccagcatgaaggattggagatgattcttggctatctggttgcggaagcggttctcgcgatcattataaatagcagttgccgcctgtatcaatccgttgattgctccggtatccttatcgggaagcacatagcacggtctttccttcataaagcggaaaaaggtcggttctaaccgcaggcaggcttcccgaaacatatctttgggaaatccgaaaaaggaggctgtgaagtcactgctgctgccattgatacggataatgcttcccggcagcagtaccacctgagtgtttttgacgatttcgtactctttcagatcgatggtgacgtgtgcccatccactgcggcagaaatagatggcacccccttccattttccagaggtgatgcatgataggtgacaaattctcatcgcttccggcaacaaatgattcccggagaacggcaagggtagagtttctctgtatcataactattcttatttagtgggcaaaaataggactttttcactaaatatcgctcatattgttccgaaaatgaacaaaactctaaacactatgaccagttttctgtggtgaaaagagtctacctttgccgcgatcaaaaattttaataggtaacacaatgagtaaaaaggtatgtaaaatgaagcaagggctattgttgctcggttgtctggttgctgctgcaggttgtaagcaagctccacccacacaaatggaaacaggatatgaagtaatgaccgtttctccgaccgaccggatgatttcgagtacctattcggcgaccatccgcggacgtcaggacatcgatatttatccacaggtaggcggtacgctgacaaaagtcagtgtcaccgaaggacagcgggtgaagagcggacagacgctgttcatcatcgaccaagtgccgtatgaggcagccctgcagacggcagtggcgaatgtagagtcagccaaagcgtctctggcgacggcacagctgacttacgacagcaaagaggaactgtataaggaaaatgtagtttccgctttcgatctgagtacggcaaaaaattctcttctggctgccaaagcgcaactggcgcaggccaaggcacaagaagtgagcgcccgtaataacctttcttatacggtagtgaagagtccggcagacggagtggtaggtacattgccttatcgcgtaggtgcgttggtgagttccagcattcccgaaccgctgaccaccgtttccgacaattcggatatgtacgtctacttctcgatgacggaaaaccagttgctgggactgattcgccagtatggctctaaagacgaggcgctgaaaagtatgcccgccatcgacttgcagctgaacgataaatcggcttatcccgaacagggacagatcgagtctatcagcggagtcattgaccgttcgacgggtactgtcagcctgcgtgccgttttcccaaataaggacggactgctgcacagcggcggtgcgggtaacgtagtgattccggtacagaaaacgggagctttggtgatcccgcaaggagctactttcgagatacaggataagagatatgtatataaggtagtagacggcaaagcgcaatctgccttggtgcaggtgacccgtgtgaacggcggccgcgaatttatcgtggatgaaggactggctccgggcgatgtgattgtggcggaaggcgtaggattgcttcgtgaaggtactccgattaaggcaaagactgcccaggcatctacgacaactactgaaaattaaacaaaggaggaatcatccatgaatttaagaacctttattgaacgccccgtattatcggcagtcatctctattacgattgtcgttgtgggtatcatcgggctgttcagtctgcccgtcgaacaatatcccgatattgctccgccaaccattatggtgagtaccacctattatggcgccagtgcggaaactttgcagaagagtgtgattgctcctttggaagaagcgatcaatggtgtggaagacatgacttacatgacttctaccgccaccaatgccggtacagtgagtatcaccgtgtactttaagcagggaacagacccggacatggcagcggtcaacgtacagaatcgcgtgtcgagagcaacaggacagcttccggcagaagtaacgcaggttggtgtgactacttccaaacgtcagacaagtatcctgcagatgttctcgctctccagtccggacgatagctacgatgaaaacttcctctccaactatatcagtatcaatatcaaaccgcagattcttcgtatctcgggggtaggtgacctgatgattatgggaggtgaatatagtatgcgtgtatggatgaagccggacgtgatggctcagtacaaactgattccgtcggacatcactggtgtgctagccgagcagaatatcgaatcggctaccggttcatttggtgaaaactcgaacgaaacctatcagtatacaatgaaatataaaggacgtctgatcactccggaagaatttggagatattgtcattcgttctacggacaatggtgaggtcctgaagttgaaagacatcgccgaggtacagttgggacaggatagctatgcttatcatggtggaatggacggtcatccgggcgtttcgtgtatggtgttccagacggcaggctctaatgcgaccgaagtcaatcagaatattgatgaactacttgaggaagtccgcaaagaccttccgaaaggagtggaactgacgcagatcatgagttcgaacgacttcctgttcgcttctatccatgaggtggtgaagacgttgatcgaggcgattatcttggttatccttgtagtatatgtgttcttgcaggacttccgttctacgctgattcctctggtgggagtcattgtttcgctcatcggtacgtttgctttcatggcgctggcaggattcagtatcaatctgctcacgctgtttgcgctcgtgctcgtcatcggtacggtggtggacgacgccattattgtcgtcgaggcggtgcaggcacgcttcgacgtggggtacaggtcgtcctatatggcaagtatcgatgcaatgaaaggtatcagtaatgctgttatcacctcttcgctggtgtttatggcagtatttattccggtatccttcatgggcggtacttccggtacgttctatacccagtttggtctgacgatggcggttgccgttggtatttccgctattaatgcgttgacactgagtccggcattgtgtgcgttgctgctgaaaccttatatcaatgaagacggcacacagaagaataactttgcggcacgtttccgtaaagcattcaattcggctttcgatattctgatagagaaatacaagaatgtggtactgatctttatcaaacgcagatggctggcatggtcgctgctcgtttgctccgtagtgttgcttgtattcctgatgaacacgacgaagaccagtctggtgccggacgaagaccagggtgtggtattcgtcaatgtaagtacggcggccggtagttcgctgactacgaccgacgaagtgatggaacgcatcgaaaagcgtctgatggatattccgcagattaagcacgtgcagaaagtggccggctacggattgctggcaggacagggaagctcgttcggtatgttgattctgaaactgaaaccgtgggacgaacgtccgaatgacgaggataatgtacaggcagtcatcggtcaggtgtacggtcgtacggccgatatcaaggatgccagtgtcttcgctatttcgccgggtatgattccgggttacggtatgggtaatgcgctggaactccatatgcaggataagatgggcggtgatatcaacgaattctttaccactacccagcaatatttgggggcattgaaccagcgtccggagattgcgatggcatattctacgttcgacgtgcgctatccgcagtggacggtagaggtggatgcagccaagtgtaaacgcgcaggcattacaccggatgcggtactgagtacactgtccggttattatggcggtcagtacgtgtccaacttcaaccgtttctctaaagtatacagagtcatgattcaggcagacccggaattccgtttggacgaaacctcactggacaatgctttcgtacgtatgtcgaacggagagatggctccgctgagccagttcgtaacgttgacacgcagctatggtgcagagtcgctgagccgtttcaatatgtacaattccatcgccgtgaatgcgatgccggcagacggatatagtacgggagacgctatcaaggccgtacaggaaacagccgtacagtctcttcccaagggatatggctatgattacggaggcatcacccgtgaggaaaatcagcaaagcggtacgactatgatcatctttggtatctgcttcctgatgatttatctgattctgagtgcattgtacgagagctttatcattccgttcgccgtgcttctgagtgtgccttgcggattgatgggaagtttcctcttcgcatggatgttcggactggagaataacatttacttgcagacaggtttgattatgttgatcggtctgttggctaagactgccatcctgctgaccgaatacgctgccgaacgccgtaaggcaggcatgggactgatcgcttctgcggtaagtgcagccaaagcccgtctgcgtccgattctgatgacagcgttgacgatgatcttcggtctgttcccattgatgttgtccagcggtgtaggagccaatggtaaccgttcgttgggtacgggtgtagtcggtggtatgacgatcggtacgctggcattacttttcatcgtgcctactttgtttatcgctttccagtggttgcaggaacgcttacgccctgtgcagagcagacctacggaagactggcagatcgaggaagaaatcaaggtgagtgaagaagaaaaatctaaagcaggaaaaaaataattgatgatgaagaaaatattaatcttatccgcagcaacgctcgtgttgagcagttgcggtatctacaataaatacaaacctgtatcgaaagtccccgaaggactttatggaagcgagaccgtcgcttccgccgatacggcgaacttcggtaatctctcgtggagagaggtctttactgactcgtatttgcagaatttgatcgattcggctttggtacggaatacggatatgcagacagcgcatctccgtgtgaaagaagcggaggcttcgttgctgacgtccaagctttcttatctgccctctttgtttctcgcaccggaaggagctgtgagcagcttcgaccgtggcaaagcgacacagacctactcattgccggtgactgcctcgtgggaactggatatcttcggaaaggtaaccacagccaaacgtcgggcaaaagcggcctatgagcagagcaaggagtatgaacaggcggtgaagacgcaattggtgtctgccgtggcaaatacttattataccttgctgatgctcgacgctcaatatgagatttccgtgtccaccgaagcggcatggaaagagagcgtgcggacagcccgtgccatgaagaaggccggtatgatgaccgaagccggactggctcagacggaagccacctattataatatatgtacgacagtgctcgacctgaaagaacaaatcaatcagacggagaactcaatggctttgttgctggcggaaacacctcacaagatacaacgcggcaaactggaaaaccagcagttgccggaagacttctccgtagggattcctttgcagatgctttccaaccgtccggatgtacgtagcgcggagttctctttagcgcaggcattctatacgacgaatgctgcccgtgctgctttctatccttccatcacgctgagcgggagtgctggatggacaaacagtgccggtagcatgattatcaatccgggcaaattcgttgcttctgccgtagcttcactgacgcaacctttatttaacaagggagtgaatatcgcccagctgaaaatagcgaaggcacagcaggaagaagcccgcctcagctttgaacagacattgctgaacgcaggtgtggaagtaaacgaggcactggtgcaatatcagacggcccgtgagaaatccgctttctacgataagcagatcacctctttgcagactgctgccagaagcactagtcttttgatggaacatagtaataatactacttatctggaagtactgaccgcacagcagacattgctgaacgccagactttcacaggtagccaatcgctttaccgaaatccagggcgtgattacactgtatcaggctttgggcggaggccggatgtaggaggatagtatgaatcctgaaaaagtacggtgtcagataatcgaatacaccaaacacgagatgtatctgcacggtgctgacggactgaccatggatgacatagctaaggggatgaagatgtcgaagcgtacgctttacaagctgttccccagtaagacttgtctgttccgcatctgtctttctgatttcaccaacgggatcagaagtcgtctgaaacaaagtcagatgcggatggacagttcgtgtatgcaggtgctttttgccacagtgaacgggtatctcacgttattgcattcgttaggaaagactttattgctggatatcgccgcgaacgaagattaccgcgcttccttcaaacgggaagaggccttctggttgcagcagtttatcgacgtactgacgcattgtaaaatctgtggttacctgcttccgggagtcgatccggatcgctttgcggcagatttgcaggaggttatttatcagagttgcctgcaaggtactccgtatgttgttcagcgtgcgctgaaccatactctcttacgaggactttttgaggtggacggcattcggtatattgacgaacacctgaaactggataaattcaatgtttgtgtatgaaaggaagagggggtattaaatccggagataagcagaaaggcagttaaccgttggcaggttagtataaacgcttttattctcaccacagtgagaacattttctcatcgcattgagaaataattctcaaaggcatgagaactttttctcactgtggtgagaattttttctcaaaggcatgagaatactttgagaatatagcaacttgtatcatgctatgtattaatcggatagcagtatagtggtatctgtcttatgcctactattttatggctgcctcaaacgctcaatctctaataatgtagtttcccgcttgtttggtaaaagcggctgggctattctttgtctccatatgaaaacttgacaaatgatcaatctaaagccctttcaccacatcgacagacaaacccgtgcattctgctatcacatcatccgctatacctttctgcttgaaattgcgggctatctctatggtttggttgtgctctttgagcgcggagaacaccagaccggaaagatattcaagtgtactgtacaagcgttcccgattttccttccgctgataatccacactaaaaaatgtggaacgcttacggtgtaatatcaggtaatatgttccggcagtaagaagtcccgctattatatcaattgggatacccgttccttcaaacaaatttttgtattcttctatagccactttgtaatgcttttccctgcttcgtgccatacgtcttgtggtcgaattgtctgcttcgagttcccacactagcaagtgctgcatatcggtattgtcatataagtaatttgccaaagcctttaaggtgcttttcatgatgtcctcgttggctttgtctgtagggtgttcttcatcgaataaatcgtgtagccaataatcagagatgtatgcgtacttatccagcaaccgctcaatattcttatagttattgagcaggacggacatttgtatgtcggctctttgcataatatccgtaaaggtaatttgcgccagacctttttcacttgctaactgccggatggcatcaaacacgtccgcttccagttcggcgcgggtacggcgtgcacgtttattcttcgattgttccatgtttacttctttgttgcatacaaaagtatgaaaaataagtataagtcacttattttcctttataaaacagatttatgaaacggttcggtcaccgaacaaatttatttctatctttgtcttattagtatttagagaatagaaaaacaaagaacactggggaaagcagagtgggtaagggaacggctttctctacgaacgtatcttttgagtattatttaaatcagtagaaaatggggaatttaatttcgtttatgaaggaagtagccgatgggctgcgggaaagtgggaattttgggactgcccatatttacaggagtagcctgagtgcaatccttgcctttcatggaagtgataagcttcctttccggaaagtaagtcaggagtttcttaaaagtttcgaatcgtatctgcgtggcaggaactgtagctggaatacagtttccacttatatgcgtacgttgcgtgcagtgtataaccgtgcggtcgaccgccatcttgcgccttatgtgcctcatcacttccggtatgtttatacaggaacgcgcgcggacaggaaacgtgcgctggataaggaagacatggagcgtctgatgaaggaacttccgaaacagctgtgtcaggacaacaaggaactacagcgtactcgtggtcttttctttttaatgtttttacttcgtgggattccttttgtggatcttgcctatctgaaaaagcatgatatcgatgggaatgtaatgacttaccgccgtcgaaaaaccggcaggttattaacagtgactcttgtgcctgaagccatgaagctgatcaaacggtatatgaataccgatcctgcttctccctatcttttttcgctgatcaccagtggagagggaacggaagctgcttacaaggaatatcagctggcattgcgcaactttaattatcagttaatgattttgaaacaggttttgggactgacatctgaagtaagctcgtacactgcccgtcatacctgggctacgatggcatactattgtgaggtacatcccggtgttatttccgaagcgatggggcattcttccatcaccgtgacggaaacgtatctgaaacctttcaagaataagaaaattgatgaagcgaatgtagcggttatttcttccttaaagaaggtctatagtgtaggtaagttgttgaattagagaactgttactttgtaggtaacgggaagaaaagacgctgcaaatatgggtatattttggaaaacatgcaaacaaaaatgatattttttctgataaactactaaaaaaaggaaacacacagaataaaactgcggattttttgagaagaacacggcttggtctttaatttttgcaaaagatttccctcccctctgccatcgtctgagagcaggggttaaaaatattctttacttattcaatgaatgtagtccgcagacgcctctgtcggggtggaaaagtacgctttcccgttacctacaaagtaacggaaagacagaccaccaagatgagatggattatgaaatgacagcaaacaaattttttatttattaattgtataacatttaatttacttttatgagaaaatggacgtatttggtcgcaaccttgctaatggcgggtacgacagctacattcacgggatgtattgataccgatgaaccggaaggtatcgttgatctgcggggagcaaaatccgaactgattaaagcacaggctgcggtaaaactggtggaagtggaatggcaaaaagcgcaagtagcttatcaggaactggtaaacaaatctaaagaattggataatcagtacaaagagtacgatgttcagatgcatgctttagacgtgaaactgaaagaactggaagtagaacgcgcacaagctgctaccgaacaagcaaaagctgaggcggaagctaagattgctgaagctaacagaaacaaagcttactgggaaaataaaatggctgaagaagctgaaatcttcaaagcagctatgttgaactatcagactcagacagcacaggcacaggaagcttatgataatgcaatgaaactcattgaagctggaaaacttctgctttctgatggagaaaaagcaattattgataaagcacagcaaagactttatgttgcttctgctagcctgaaccaatattacactgccttaaagacagctcaggataattattatgatgcattggttaatcctaatcttccgacattagctagcttacaggctgaattgaagttggcacagattgcagttgaaaaggcagaaatcttattggatgagaaaaataatatgttagctttggcagaagactttgatgcagctgcatgggatgataagatcctggatctgaagaagaagaaatctgaatatgaaagtgaaaagagcaaagctgatgttgagatcgctactattaagacttccgcagattataaagctgcagaacaaaaagtagccgaaaagataaaagcgcgtaaagctgctaaagaggcatatgataaagctgtagcagactctacaacacaggttaatactcagcttgatattgcagcttataaatctgaacctattaatgaaggattgaagacattatttagtagtagcaatgattttacatctttagatggatatactgttagtacgggtgtgtttgattatccggctgttcagtatacacaaactgagtacaatgctgatttgaaaatagaagatgtaacagccagaactagtcaggcatctcttactctgatgaaagtaaatgcctggattgatgctttaggtaaatattctgtagacgaaaatggagttgaatggaataagttgactttggcagaaaaagaaaagacagccaaaaatgctaaagaaaaatttgaaaaggataaagctaactgggaaatttctgcaaaagcggtaaaaggtacagcaactacagtgccaactactgatctgaaaaaggtgacagatacttataattcttcttatgccgcagtagaatctgcagtaaaagcttataatagtgcatgggatgccgtatatcaagctgcttatgatgatgctgtagaaaaagaaaaagcttcggtattggagaaaacataccgtgacaatatgattaccgcattgtctcctactagtaaggctgcatgggaggcattgactcctgctgaacaaactaccagtaaactggaagctatattggacgatacagtgaaacaagctaaagcaaaggctgatgctaatgctactttggctgaatggctgaaacttgatcagactgttgctgatttggctgccaaaggtgaagctgcaggaaatcaagctcttgccgatgataaagataagaaagtagaaaaggctaaagctgcattggttaaagctgctggggacgctgctactgctgttgctaaggtggctcctgcaattagtacttattctgctcttgctgctaatccttacggtcagatactggctaatacagttagtgttgaagatatgacaggcaaagatgctttctataaagaagaggaaaaagatggtaagaaaactggccacatgcaggcattacgctctgatatttctgcagatgaatttactaaattaagtgcaactaagttagatcgcaatacagctgaagatgctttagagtatacttctgatgctacttttggtactgtgattcctggcgaagacagacttgttgaagtaacagaagcaatggtccgcgcttatattaagcagaataatagtgctgttttgactgactttggtactttgggagctatgatggctgctaatgacgatgtacagacttgcaaagatatgattgctgctgccgacttgattaaaccattgaaggctcaaatggaaggtgtacttgctgatctgaatgcagaaataaatacgaatactgctttaatggatccgtttattgcaaaagctgacgaaactcgtattgctctgaagactgctaaagaagaggtgaagaaagcacaagaagaacaagatgctttgactgctgaagctgaggccaatagtaagaagtttgctgaattgatccaagattacactggcttgatcagtgttgttcaagatcagattgatggtatcaacggtggtgtagtcactggtactggttctgtggtaactgtagaatctgttctgaattattggaagaatcaagttgctactcaggaaaaatcagttgaagaagctaaacagaaggttactgcagcagaaaagagcattgaactgttcaacaagggtgaatataaggaagcttatgtaatagaacagaagaaacttgctttggaaacagctcaagaagcttatgatgtagcgaaagcaatctatgatactgctcttgcacaagttaaggctgtattggaaaccttgagtaagtaatttcttaatcacgtaaaagtaacaaaatgataaagaaactatgcacattacttttgctgacctgtataacagctgcgccttcattggcgcagcgttacagcagcagtgatgatgcgtcgtttgctccgaagaaaggacagtggcaggtttcggttttacttggtagcggaaagttcttcaatgagaacacctcttatctgcttcccaagttcaccaacaccgaaggagtcgtcggacttcccaatggaggaacggataactccggtgacctgaaccgctatctgaatatcggtagtctgaataataatagtctggtcaatatagccggaatcgaaggcaagtattttctgtctgagaactgggacatcaatttccagtttagcatgaacatcagcctgactcccaagaaagactatgtagaaggcgacaacagtgtacccgatatgatcatacccgcgcaaagttatatcaatgcgcagatgactaataactggtatacctctgtcggctccaactattacttcaagactcgcaacgaacgtattcatccatacgtaggaggcgcccttggcttccagatggcacgcattgaaactacagaaccatacaccggtgatacctataaggatagcgatgattcggaagaacttccttctcaggtctataccgcaggaagcaaagccggtcagatgtatggtatgaaagtagctgccgtagcaggtatcgagtatagcattgccaaaggatttattttcgggttcgagatgcatcctttagcttatcgctatgatctgatacaaatttgtccgaaaggatttgataggtacaatgtcagtcaccataacatcaaaattttcgaaatgcctgtggtgaaacttggcttcagattctgacgaacaatgattatacaaatgtataaatgaaaagtgaaagccgctctgctgatattggcgggcggcttttctttcttttcaagaagaaataaaagtccgatgaatagatgtataagacttttgccctttttcattggggtattagtattgggagcttgctctcaaataagaggttacagaattgacggtagtgcgcctctgccggaatttgagggtaaaatggtttacatgaaagatgtttcgacggatgcccctgttgacagcgcaaggataataaatggaaagtttgcttttgcagacacgacaaaaatagaaaatccggtcataaagatactttcgatccatgccagtaaaatgggactggaataccgtttgcctgttgtgattgaaaacggtactataaaagcgagtattgccgatgtcgtttgtacggaaggaacgatgctgaacgaacggatgcaggattttcttctggctatagatgcatattctgctgcttgtacggataagccggtggaacagatacaatccggattctcggaattactaaagagatatatcgagatgaataatgacaatgtaattggtacttatattcagacagcttaccagtcatcactataatacgataaatattctttttcatttctataacaaataagatatacgaatacagagataatttaataaacaagagctcaatcataataatccttctcctgatatcttccggattaatgcactacttctttatgaaggggatatccataagacgagaaacaaagatgcgcccttgcgaaagtccggatttttgtattattatgtttttaaggacgttcctgttcccacatttcccctttttccccaggaacgtccttttatttttcaactaggtttgtctttttattgtaaagcacggatacgtacttctatttctttttcgttttttaatccgtccttcacttcattgatattcgtatctccgtaatggtacggatacaaaatatgcggttgaatgattttagcagattgtatagcttgttccggtatcatcgtatacggttggttgacaggtagaaaggctatatcgatattctttatttgtttcatttccgggatatcttccgtgtctccggcaatgtaaatccgggtgtcgcccacagtgaggatatatccgttgtcacgtcccttgggatggaatttgtctctaccgggagttgtattataagcaggtactgcttccagtttgatttcgggtgtaatttgcagtatatcaccatttttcatggcttgtcctttgtccagcatcttctggcaattcggattggcaataatttttgtatccggagtttcgatagcagcaatcgctttggtatcgaaatgatcatggtgttcatgtgtgatcaggatatagtcagctttcggttgctgtgtaaagtctgcgtaatcagagactggatcaataaaaaacttttttccagcatattctattaacaaactggcatgcttaaagaaagtgatcttcaggcttttcccgttcttggtggtaaacgaatccgtttcgaagttctgcatctttgtggtcagattaattgaatgattgaataaacaggaataagcaaatccgtaagaaaggcacagcgcgagtgctactaataaaatctttttcatatctatacagagtttggttccttacaaagataaacatctatagcgatttatcagttcatgattaaacatattctgttggaaattaactttcttattgagaaggaggataataggcagtaaataagaaagggatgaggcattggtgaaaagagaaaggcacagagtcaaaatatcctgtgcctttgctgtttgttatctgatagtaatcagcttttacgcattcaatgcctgctcgatatctgcaatgatatcatccgcattctcgatacctacggacaaacggattaagtcgggacgtacacctgcttccatcagctgctcatccgacaactggcggtgagtatggctggcggggtgaagcacacaactacgggcatcagctacgtgagtcacaatagcgataaattctaatgaatccataaacttgatagatacatcacgtccgcctttcagtccgaaggagattactccgcaggagccgttcggcatatatttctgtgccagtgcatagtatttgttatccggcaggccgcaatagttaacccaagccactttctcgttcttagaaagatattctgctactttctgagcgttacgacaatgttgaggcatacgcaggtgcagtgtttcaagtccaagattcagtaagaaagaattttgcgggctttggatgctgccgaggtcacgcatcagttgtgcggttgctttggtgatgtaagcgcctttgccgaatgcttttgtataggtcagaccatgataagattcgtccggtgtacagagtccggggaatttgtctgcatgggcatcccagtcgaagttgccgctgtcgacgatacagccgcctacgctggtggcgtgtccgtccatgtacttggtagtagaatgaacgatgatgtctgctccccattcgaaaggacggcagttgataggagtcgggaatgtattgtccacaatcaaaggcactccgtgactgtgtgcgatacgggcaaacttttcgatatccagcacttcgagagaaggattggagatcgtttctccgaacagtgctttcgtattaggctggaaagctgccgagatttcttcttcgctggcatccggattaacgaatgtaacgtcgatgccgagtttcttcatggtgacaccgaataaattgaatgttcctccatagatggcggatgaacaaacgaaatgatctcctgcctggcagatattgaaaatggcataaaagttggctgcctgaccgctggatgtaagcatagcagctacaccaccttcaagggcggcaatcttggcggcaaccgcgtcattggtcgggttttgcaggcgggtataaaaataaccactgtcttccaaatcgaaaaggcgtgccatttgttcgctggtatcgtatttgaaagttgtactctgatagatgggcagcacacgcggctcaccctttttaggcgtccatccggcctgtacgcacagggtttcgggtttgaattgttttgccataatgatatagggttttaagttttattgccaaaaaaagttttaacggggcaaaagtagggaaaataattgtatttttgtcctgtttataagtgaaatgatactgataaggtagtagtcgaatatgaaaaaaagattctatattcttttattaattagttttcttctttcgttggctgatgtgcaggcgcaacaaaaagctactccgaaagcaggtgaggggatttctacttttttgctgcgtcataaccgtgctccaaagaaatattacgatgattttgtggaactgaataaggcaaagctggggaaaggaaatgtgctgaaactgggggtgacatatacaattcctcctgtcaagagatcgacggcggctgataaagagacaccggcaagaaaacaatcctcaaaggcttcgaaaataggaaccactcttcatgaacctcttttcggtaagcaactggcgaatgtaaaggtcacttccaaccgactggcaggtgcctgcttctatgtagtcagcgggcatggcggtcctgatccgggagccatcggacgggtagggaagcacgaacttcacgaagacgaatatgcctatgacattgcacttcgtctcgcccggaatctgatgcaggaaggggcggaagtgcatatcattattcaggatgccaaagatggtatccgtaatgacgcttacctctctaacagcaagcgtgagacttgtatgggcgacccgattccattgaatcaggtgcagcgtcttcagcagcgttgtaacaaaatcaatgctctttatcggaaagaccgtcagaactatacttactgccgcgctatcttcatccatgtagacagccgcagcaaaaaaaagcagacggatgtctttttctatcattccaataagaaagctgaaagcaaacggctggcaaacaacatgaaagatacgttcgaatccaaatatggaaagcatcagccgaaccgcggcttttccggaacggtgagcggacgcaatttatatgtactttcacacactactcctgcttctgtctttgtcgaactggggaatatacagaatacatttgaccagcggagactggtgatggattccaaccgtcaggcccttgccaaatggttgatggaaggctttctgaaagattttaaagggagaaaataaacttcaatctctttttttcgtgaacaaaacgaaaatcgggatgttatatatgtgcaaatcgcctgatggctgcttgtaggtatgcgaatatatatgagtcagtgaatatgcctccccggcataacaggaagattgcatagtagttttgtcgtgttttattttgtgtttgtgttgtgacggtgctgcgatgtgaatcggggtaccgttttttttgttaaaaagtcgtcttaacttcatttttttcagaactcttgtgaacaaaatccgaatgggtgcgttatttattatgcaaatcacctgataaagcttcttatgggtatgcgaatatagataagtcaagcaagatatgcctccccggcattacaggtaagattgcatagtagttttgtcgtgttttattttgtgtttgtgttgtgacggtgctgcgatgtgaatcgaggtgccgtttttttgttataaccgctttggggttataaccagggattatccgacataataaaattctgtgattcagtctgccggaaaatgtcttcctttgcaaaaaagaaataattaagtatcacttaaatcaaatcatttatgttcaatgaaaagagaagcagcatgctgcacggtgtcctgttgatagcattattttcttgtgctgcattttatattggcgagatgtcttttgtaagaagtatttctttcagtccgatgattgtcggtatcattttgggtatgctttatgccaatagtctgcgaaaccaccttccggaaacgtgggtgccgggtatccagttttgctcgaagaagattctgcgcatcggtatcattttatatggtttcagattgacttttcaggatgtgatggctatcggattgccggctatgctgatcgatgtgattattgtggctgtgactatttgtggcggcatctatcttggtaagctgctgaagatggaccgtggaatcgcattacttacttccatcggaagtggaatttgtggagccgccgccattctgggggctgaatcgaccatcaaggcaaagccatataaaacggctgtgtccgtgtctactgtcgtgattttcggtactatttccatgtttctgtatcctttcttgtaccggaacggattttgtgcactgactcccgatcagatggggatttatacgggggctaccctgcatgaggttgcccatgtagtaggtgccggagacgcgatgggaaacggtatttcggattctgccatcatagtgaaaatgattcgtgtgatgatgttggttcctgtgcttctgattactacctatctggtggcgagagcgcggaaaagacaagtgcagaaagggcagaagtttcagaagattgcagtgccctggtttgcaataggctttatgggtgtcatcgctttcaattcttttgatttgcttcctgcgcagttggtggcaggtattaacacactggatacctttttgctgacaatggctatgacggcacttgggacagaaacaagcatcgataaattcagaaaggccggagccaaacctttcgtactggctcttttactttatgtgtggctggtggtcggcggatatttccttgtgaagtatctcactccttatctgatgtaggagaaatcatctgatgtaagggaaaacgtctccttgcaaaatacttattatcactttcaccgcaaattgtacaatcttagacggataaattaagtgtcagtcactgagaacttcccattttatctgtatgatagatacaatttgtggcgaaagtgatgcgtttcatccgggcaggctatatttattgcttttctttcggatagttaggaccgtaaagcatcgtttttttgcggacaaccaattgaccgtctttcacaaattcctctccccgttcactgaggtggcggatcatttctgcacgcatgcctgtcagcagctttttatatttcttgtcgttcacagcattatgcagctctttgggatctttggcaaggtcaaacaattgctcttcacctgtatagaagtaccagatatatttaatctttccgtcggtcaaggcacaccaatagttgtcatcactgtagcaagtggcatgttccagatcaatgtatttgcgccattccgtttctgtacctttagccagagatagcagagagcgtccgtctatgtcggtggggacggaggttcccgctatttcgaggaaagttggcagcaggtcacggagttctacgggattatccaccttgccgggaacgacttgcgctttggctggccatttaataatataaggtatgtgcgtagatccttcatacggataagtcttccgccagtggtagtgatctcccatcatatctccatgatcggaaacgaaaatgataagggaattatcatacattcccttgtcttttaaggtctggaggacacgccctatctgttcgtctatgaaagtgatgttggcataataatagcgtttggagtgacgtgcatattcatttccgaagttgccgtagggagcatctttggctgctttttcgggggccagttctttggcgtatttcccacaccagtcaccaatgacgggatcgggaacctgtgcatccttatacatgtcgagaaagcgttgaggcgggtcgtacgggctgtggggacgggcaaaggaaactttcaagaataagggctgattgccgttatcataattctgtatcatctgacaagccatttcacctgtccaataagtagggtgcagactttctttcagtttataggtagctgctccgtgatcgttccatccgattccggtttcatccgggttctttcccggtgcctgtatttgaaaccataagcgatagttactgatgaaattcggatcttcccggcgtccgctttcatccagcagcgttccttcgaaaccgtgtttgattcgttgcggatgccagtgcatttttccgataccgaaggtataatatccggcatctttcagcatctgaggcatttcgtggttgtacttgggggcaactttaccgtatcctaacaagccatgatgccagggagactgtccggtcaacagtccggcacgggcaggggtactgctgggacacgaagaatatccgttcataaacaacgttccttcgcttgccaaatcgtccagatggggggagataacagattcattacccatgcatcccatggcgtcgccacgttgctgatcggtcataattaagataatgtgcggttgtttttgtgcataggccaaaaatgagcacaatccggccgtgacggcaaatgtacatttcaggttaatcatattttctggtttttcataatgtaatactgcaaaggtataaagttttatctattttgcgtgaaagcatttctgctttttatatgaaaaaagaaactgtttcagaaacaggtgggggcacctgtactgaaacagtctcttttattatagctaaccgcctataacttataaaggcatatttccatgttttttaggcggattcgtctgcatcttgttctctgtcatttccagtgcctggatcagacgtttgcgggtttgtctcggatagatgatttcatcgatgaatcctagttcggcagcttggtagggagtggcaaacttttccttgtaggcttccagttctttatcttttgtctctgcatccgctttgcggaacaggatgtttaccgcaccttccgcacccatgactgcgatttccgcactcggataagcgaagttcacatctgcacctgtctgtttggagttcatcacaatatacgcgccaccgtatgccttgcgggtaatgactgtcagtttgggaacggtagcttcggcaaacgcataaacgattttagcaccgtggcggatgataccgttgttctcctgcgtatatccgggaagaaatcccggcacatcttcgaaagtaatcaacggaatgttgaaacagtcgcagaaacggatgaagcggcttgccttgtcgctggcgtcaatgtcgagaacaccggcaaggtaggccggctgattggcgacaataccaaccgaacggcctgccagacgtgcaaaaccgatgatgatattctttgcgaagttagtcattacttcgaagaaatagccgttatctactacccgttcgatgatatccttcatgtcgtatggtacattcgggtctgcggggacaatggtgtcgagtacggcatcttcacggttggtctcgtcagtacagttctgctttttcgtttcgtccatattattctgaggcaagaaggaaagtagttcgcgaatgctcatcaacagttcttcttcggtattgcacataaagtgagtgacaccgcttttgctgctgtgtgtcatggcaccgcccagttcttctttgcttacctcttcgtgaatcacagtctttaccacatccggacctgtcacaaacatgtgactcttttctttcaccataaagatgaagtcggtgagggcaggagagtagcaggcgcctccggcacacggaccaagaatagccgaaatctgaggaatcaccccgcttgccattgtgttctgatagaaaatatccgcatagccggaaaggctttcaattccttcctgaatacgtgcacctccggaatcattcagcgcaattatcggagcaccgttcttcaatgccagttgctgcactttcacaatctttttcgcgttcgaagcagacagtgaacctccgtagactgtaaagtcgtaggcataaacaaatacctggcgcccgtcaatctttccgtaaccggatacgatgccgtctcccggaatcttgtttttgtccatgccatagttggtgcagcggtgaaccatcaacttgtccagttcaacaaaagtacctttgtcgagcagcatttcgatacgctcgcgggcagtcatctttccgttttcgtgttgcttttcaatcttttccacgcccccaccgagggaagcgatgcggtcacgttcctggaacgtggcgtatgctttatttatttcttccatgatgcaatccgtttttagtattatacaatcggctctaatgttattaatgtctggtcaccggtgatgttgtcgccttcttgaaccagaatttccttgatgcggcaatctgaagtcactttgtagttgctctgcattttcatggcttcgatgacgatgacggtatctcccgttttcatttcctgccctgccgtaacagggattttcaccacctttcccggcattggggaagtgatgcggtcgttctgttcatcttcgcctttcttgcgcatacgcagatactttgcctggctgtccacgatttcaacattgaaactgctataatgcgtatttaccttatagcttttaccgttttcgcggcgaatcagttgtgcgtttgcgctgcgaccgtccatcagaatattgcaggtgccattttcggccatcacaacatctgcttcaaacggttttccgtcaatggtaagtaccactttattgtcttccttgctgacgagctctatttccgctacgcggtctcctatatgaatttccataattgaatgctgtttttagtttagatacgaagtacacctttgtgcaaaccgaattctttccatttgctgatgggacggttgtccgttgcgtcacctctgttttcttcaagattcatcagataatccatgtaggcagcaatcatggcaatattttcggcacgttcgctggtgcgcatgatgcattgttgcagatgttcgccgttcttggtgataaagcctgtgtcgtaatgaccttccacgaaatccggtgtgtccatgatggcacgtaggtagctgatattgttctttacacctgtcagtttatactcatggagtacgcggcgcatccgttcgatggcatattcgcggttggtagcccatacgatcagtttgccgatcatcgggtcataatagatcgggatttcatatccttcgtaaacgtaactgtcgatacgaacaccgattccgttcggttctgtaatctgtttgatgattcctgggctcggcatgaagttcatttccgtgtcttcggcacaaatacggcattcgatggcatggccgcgctgttggatatctttctgtttcagctggagcacttgtccgtcggcaactttgatctgctctttcaccaagtccactccgaccacttcttccgttatcggatgttctacttgcagacgggtgttcatttcgaggaagtaataattgcgatgcttgtcgaccaagaactcaatcgtgcctgcaccgatatagttgaccgctttggccgcggctaccgccttttcacccatatctttacgcagttcgggagtcacgaaaaccgatggcgtctcttccacaatcttttggttgcggcgctgtacggaacattcgcgttcgcacaggtgaatcacgtttccgtgtttgtcgcccagaatctgaaattcaatgtgatgaggttcctccacgaacttctccagataaacggtatcgtcgccaaaagaagaaagtgactcgctcttggcagttgtataagcctcttccacctcttccgcactgtggataaggcgcataccttttccgccgccgcccatagatgctttcagcatcaccggataaccgatcttgttgcagagttctacggcttcttccacacttttcagattctcctgtgtgccgggaacgacagggacccctgcctcgatcattttaatacgggcggatatcttgtcgcccattgcctccatcgtttcggggtccggtccgataaaaataatattttcttcctgacagcgtcgggcgaaagtcgcgttttcggacaggaaaccatatcccggatgaatagcgtcagcatggcattcctttgccacttcgatgattttttctatattcagataactctctttggatgctgccggtcctacgcaataagcttcgtctgcatagagcacgtgcttcgcggtccggtctgcttcggagaaaattgcgatactcgttatctccatctcccggcaggagcgcatcacccttatggcaatttcaccgcgattggctactaagattttttttatcatactttactcaattaagtacatacttatttaatgccttcccatcttcacagacatagtccatccgacagaaacacagtattttcttgatttggggcttaacaaatgatgttctttctcctaacccacgaggcagaagaacgctttacgcgaagtggcaggtcttctgactgactcttgtcttatagtgccttcccaaaataacatcagtggcgataaattagttcattaataagacattgtatagagcttcacagcagcgggactgtacgggatttacacccgattcccttttaatcgtcatccgttggacacggactccgaaccatttcggggggcaaagataaataaatattgaatactgtgttctgtttttgcacgaaagtttcagttttgtgcaatgaatgctccggtagatttcctctcctttacttttccaatagaactaaatctctgtgtattaatgtttatgcgttaaaccttcctctttttgtattgttaagactcccactaattaattaaaaggagaatcgatatgaaagaaaagaaaatagctcgtgatacgagaaacagagagaaactggcgggtgatgactgggtaatggcagaattttatgcaacgtggtgtcctcactgccagcgtatgcagcctttgataaaagagttcaagaaagagatggaagggatagtcgaggtagtacaggtagacgtagacgaggaaagtgatctcgctaatttctataccattgaatccactcccacattcattcttttcagaaaaggtgaacagctctggagacaatccggtgaactgacgctggaaagattgggaagagcggtcaaagagtttaaatcttgaaaaagtattaataaaaagggatgcttttctatgaaagttttaaatcgtgttatgaaacatacttttttatttggataatttgctaataacacagaagtacgtatctttgcactgtgtttttcatagtattagatttaaggttaacaaaggttggagcaaggcgttgctcctttttttatgcccgtaccccggctttctgttcagagcggtctttatttcgccagccttagttcgtacagacaagcctgtacttcctctggactgcctgtatgttttccctcgtcatccgatagtttgatgcattctctccattcctgattgacattcattttgcattgcgtgagtttcatgacaatgttggaaggggcaaatcctgtgtcattcgttagattggtaccgattccgaaggaacagcgaatcttctccttgcagtattcttgaatttccagtgccttcgtgaagtcgagagcgttgctgaagacgatagttttggtagtggcatcaatgcccagttctttatagcgggctaccagtttatcaataaaatcaaactcattgccagaatcgcagcgtactccgtcgaatagcttggcctgcttgcggctgagattgctcaggaatattcctgaagtataagtgtcggacagcgcaatgcccaaatctccgtcgtatacattcacccagttttcgagcgccatatagttggcgtgcttatatccgaactgtgccccatgaaacatgaaccactcatgcggatgagttcccatcattttcatgccgtacttcatggcaaagtagcagttggaagttccggtacagtatttggccgtatcattcagccgtttgatcaccgtctcctgcacgtcgattgagaatcttctccgcgtgccgaactccgagaagcggagctggtgctgattggacaattccactttctccgacaatttgcagagtatctcgctcatatcgggtatgttgccgaaaaacttgtttttgatttcggatacgatggcgagcagcggtacttcatacagtgtgactttataaagaaaatcgctgacttcaatatgcagccggcccgttgtgtccagatgaatatcgatcttgtccggatcaaaacggaaagaagacagccattcccaatagactctcggaagaaaccggcaattgcgtgtcatgtattccagttcctcttccgtaagtctcaaccggctgaggttgctgaattcgcttttgagcgcttccagaaattcttcggtatattcagtttcgtttctgtcattgaagctgaaagtacccattgcgtaagggaataatttgatataagcgtacgaggtggtaaacttatagaggtctgtatccagcagtgttcttacaatcataccgtttattatttaatatgtaaaacgttgtaaagttagtatttgttggacaatcctactgattaattgacaataattctttctttagtaagttaatcccacttttagggtgatggagtggtgagacagttcttccttgaattcggtatggaaatattcatcggtccgctgtttcagcgtttccagttgctgtatttcatagcttaaggcaatattcatttttaatttttgagtgagctttacttgtgctcctacagacggggaaagataaaatccgccattggtttctttggcagccgccaatgagccaccaatgttgcattccagatagggagtaagtttctttggtcgcgtcatgaagaactgttttggagtatgttgaaagagaggggatgaaaaagagaataaatggacagtacatctggctttattagcaaagagtaagatactttttgatagccaatcgttcttatgataaaaagcaggatgtactgtccggggtatatttatgataattcaacggtaggattgtgaatggttaagccgccgtctaccacaatcgtctgtccagtgatgtatcgtgcatcgttggaggccaggaatgcaatggtggcggcaacgtcttcgggttctcccaaataaggcgtggcgcactgtcccagaaatatgttgcgtacttcttcgttcagattgtccagtgcggcaggggtaagaaccagtcccggtgctacggcattgcagcggatatttttctttcccatttgggtggcgatatatttagtcagattgatgacacctgctttgctggctccgtagagagtgccattggcgtcggctgtcagtccgcttatagatgctacgtttacgatatttccgcctccgtgagtggtcatgatgggaatgacctgctgagaaagatacatcgtgcagcaaaggttcagatggaatacttcgtcgaagtaatcgatatccagcttttcaatattcagatcacgtttggggtcggttccgcctacgttgtttataagtacgtctatctgaccgtattccttcatggcgaaatcaaccagttctttacagctttggagttcggtagcggagaaatagatgggacgcacgtcggcccctgcttgagtgagttcggcggcaagcttgtcggccctttcctgcgaatgatcggcgatgactacttttcctccttcggagacgatgcggcgtgtggttgcttcgccaatgccaccggcagcaccggtgatgacgactactttgttttcaaatcttttcatatatgttgagaatttgatgattaccttcctctaattaacagctaatgaatggatttgttgttgcctgtaaactcttattaataggaatcggcaacagattcgaaaacttttgcatctcatccagttttatgggttaaatatttaagaagactgctaaatgttaacatgaagttgcttatttgttaatgcggttctgattctattaaaccatgttataagatatcccgttttagccggaaaatttggagatgaggcaaaagtccgtatctttgtactgtgtttttcatagtattagatttaaggttaacaaagattggctgtctgggatagatagccttttttttgctcttatgcgaaggaattatttggagtccgggcgtgattcagaataatgaatattgattgtttcgcagacttttcatttcccgttccttcactacatcatcttctgccggatgcccgatcagcaaaggcgaattcctgtcatgtttcttagtgttatattccacactgttgtaattgcctttgatggcgtaacaatagatgcatccgttgaggcaactttcataagtgcctatgtcgatactttcaatgcaattgcagacattccgctgatttttgtcttttttggcaaggagggggtagccggtgattctttcgatcagttctttgtcgatacacagtccggcagggattcccaaatgtctcagatcaactttggaggtgcaggtatccagttggatagcaggatattcgttgatggtattcctgaaagagacggctatttcttcaatctcctcttttcgcaacggctgtatgttgaactggccgactgcggtgcggatatgctggtaatggtcaataaatcccagcatacacttttcggtatggtctttaagtccgtaggcaatttgggcgaatgcctccttatggaaagaaacgtcatattcctcgttagtcagtatcgggtcatagcgccagatcactttctcttttcctattttatccgaaaggcgtttgaatatgtctattcgtttgtcgatagacggcagattattttctaatttctctccgtaaggattgagggtgaactgaaagtagtatttgtagtcttgcagatgatccagtttatcaatcatcggagcaggattcttggtccagaacacgatgcaatctaccacagcaggatgtaagctgaccttgctgatcattttaggattaaaaggattgggaactaacacgtatccttctttaatccggttgaagaaccattgcgaatagaatgccggaatatctgtccggcggctggcgctaattatcatatttcaaagttacggtaaaattggttgtattgcaataattccgtgatgaaaaataatcaatagaacggatggatgggagaatagagcatactgataaaggtttaataagagatgagaggaaaaagcggacttagttgctttttcaagaatctctttaagcaggaactgtgaatgaatatgttaaatgttaacatgaaaagtctgaaatgttaatgcgcttccgagaatattaaaccgtgttatattatcgtccgattcggctctgaaatttgctatttacttgaaaggtggtatatttgtactgtgtttttttcataagtattagatttaaggttaacaaaagattggttgctcgtgatgagtagccattttttgtttttatacgtcgataattgtttattctttaatcatcgttaatagcatcttgaatttttccaccgttgtaagtgtatgtgatacctattgtttgtacataacaaaaatcgttttttattgttatagtacggaaagtaactaataaggagaacattatgaaaaagaaatttttattgtttggagcactggtcggtgctttgctgttgtcttcctgttcgggaggaagtaaaaagcagactgtatcctcggaaagtacggaggaattggatgatgccagtaaggtgatcaattattatcatatgtcgctcgctgtattgaggcatgtggctaatgcgaaagatataaacgctgtgttggggtacatggaacagactgggaaagtgcctgaagttgaaccgattgcacctccggaaatagctgcccgtgatacagcggaattgttggacccgggagactattttaatcctgaagtccgtcagaatctaaagcagaattatgccggattgtttaatgtgcggacacagttctatgataacttcaataaatttcttgcttataagaagtcgaaagatacagcaaaaacggctcagcttctgaatgaaaactataagttgagcgtagaactgtccgagtataagcaagtgatttttgatattctaagtcctttgaccgaacaagcggagagtgaacttttggctgatgagccgttgaaagatcagataatggcgatgcgcaagatgtcaggcacggtgcagagcataatgaatttgtattcccgcaaacatgcaatggacggaatgcggattgatttgaaaatggcggaactggagaaggaactgaaggctgcggaaaaaattccggctgttaccggttatgatgaagaactgaagaattttcagagtttcctctctaccgttaagtcctttatgaatgatatgcagaaggcaagaagtaaaggcgcatattcggacaaagaatatcaggcgatgtcagaagcctatgaatacgggctttctgttatttgaaaataaatacgatttttggtagggctgtctcatgattctataatggggcagcttcttttttgtcagaatgtctcttttttacaatacagattcaaagagactctctacttttgcttccataattaaaaaagtgatatctttgccatatgcagtcatttcagattataaagcccgttcctgtgctatcgccttacatccgccattattggatattgcaggatgatgcagcagtttctgtttccgaacggactttccccatcggttgtatgcagcttgtttttcataaagggaaacagctcttcctgcagaatgatttaaagttgcagccacagtcttttatttgcggacagtcgatcggattctccgatgtgttgtcgacgggtaggatagagatgattacggttgtttttcaaccttatgcagcgaaagccttgctccacattcccgttcacttgtttcatgggaaagatgtagcgatggatgaagtggaagatgtcgaactatcggatttggcgaagcaagtcactgatacttctgataatatagtctgtattcgtctgatagagcagttttttcttcgtcgtttatatgctttttccgagtataatctgaagaggatgtctgctgtctttcaggaaatcaatcttcaaccacagataaatattcctcaattgtcggaggcggcttgtttgagtagcaagcagttcggacgtgtttttgccgatcatgtcggtacgactcccaaggaatatcttcgtattgtgcgtatgcaacgtgctttatttctgttgcaacaggatgtgactttgccttttgtacaagtggcctatgaatgtggatactccgatcagtcccacatgatcaaggaattcaaactattttccggttatacgcctgcagaatatctttctgtttgtgctccttattccgattacttctcggaactttgaaaatgtcttttttttcctatcagagctttgtggcatcccttacttttgcagtgtctttgcaaaggctcaatagtaaccataaaaaaagaacgaaatgaaaaagtttattgcattttttgagattcctacagttgattttcaccgggctgtcgatttctatgaaacagtgtttggggtacagcttccggtttttgaatgtgaagaggagaagatggcgtgtttcacggaagaaggtgaaacggtcggcgctatttttcatgctcccgattatcttccttcggaaaaaggagtgattatctcttttaattgtgaagacatcgatcagacactggaaaaagtccttcggaaaggtggaaaaatcatgatgcccaagacgaaaatcgaagtagagggcagaggctggtttgccttgtttgcggatagcgagggaaacagggtagggctttacgctgataaataacagataaaagagaggaagattatctgtccggcgtagttgccctctgatgggtaatgatgagcgaaagtagaatgagactgcattttttatggatgcagtctcatttatttttaaatccttcttattctaccggaatataaatctctgtcaacagctcttcgggagcggtttcgcacggattgttcagatagcgttcggcactgggttcatcgcgtagcgtacattccatttcgggcagacattttccatagatagtatcatataccgcttgcagattgtcatacgtacctttatataagaagattgcataacgtcctgccggaagtgtcttgaatcctacatctcctttgggagctacctgtacgggcatcaccatacatacatcggtgcgcaatttctcggctggtgtcactttggggtcgtcgtgatagatgcagagcgggctgaaatctcccatcggcagcttttgttctttgatgaactgccacagacgtccccatgtccctccgtagtcattcagtttgtagtcaccggacaggcggatataaataacattgcgtgcaggtatactcttaatttcacttttcagttccaggtctggcctgataatcgctggtttcataattacaaagtttttattgtttcgatactctaaaggagaaataccataaaactgtctgaacactttcgacaaggaagaaggggatgaatatccgatgcgataggcaatatcggcaataggaatatccgaatagcgcaataaacgtgcggctgcttctgtccgcgtccggacaataaaggtaccgatcggttcaccgaggaatgctttcataattcggtgaaaataaaaaggagaaaagtttgatatcctggccagcgatttcaaatcaatgtcttctcctaaatgttgattgatatattccaccacaacatttacgcacttttgatactcttctttggttgttttcttctgttgcataacttcttttggtatttcacttcgcaaaggtattggtaaaaaagggaacgaacttgtccgatattgctattattcattttttttaataaaacctgttgattctcttttagttatgctatgaatttatttgatgattttgagtattccagaatggtgctttagtataaaatatgaccgaatatttaactgtttgaacccgattcttttttgaatctttaaataatgtcaatctgttaaataaaataagagaatatgttatgaactattattaaaatagctatcttagtttcgaattattaatagagaatagccatggataaaagagtagtagggaacaatgccggcaaggtctggtgtgccctgaaagaaattggtgaaatttcgataccagaattggcgagaagattaaaccttagcgtagagagtacagcattagccgccggttggctggcgagagagaacaaaatttgtatccagcggaaaaatggattaattgctttatctgatgaaagcactttcccttttagctttggataataaagaatgctgttcgtgaacatctttgaagttccattaacttataagtaaagaattgtcgatataaagtatcgtaagttaaatctgaacctgaagaactgaatttagaaagagttactctgtgtatagggtaactctttttaatgtataataaacgtataataatgctgttagtatcttcttctttatatgaaaaatatatactttatattagtgcgaaattatgtgcgtgaaaatttaggggatcgtttgtctattcttcagtctctttatcggtcgatactgtggcgctactttttatggcatgaataacggcggaagtaaatcccctgtgctccagttcattcaatcctttaatggtggctccaccgggagtagctgctttttctatttctaacagcgggtgggtgtcgtgatttaaaatcagttctgtagctccttccatgctatatgccgtcattcgcattgcatcttcagcggagatacccaattctatgccggcttgcatggctgcatgaatatattttaatgcgaaagcgattccactggaagttaatgcagaaatgatatccagctgtttctcttctgcgaacaaacactttcctccttcttcaaatgtctgttttatgagttgctggtgttctttgccggctttgcgtgaagttatcagggtcaggctcgaatgttccgtaatggcgatgtttggaacaacccggaatataggcatttcggtttccgataaatgtgccaggtgagaaatggatattccggttaccagtgaaaccaggatttgggtgcgtgagaatcgtaacggagataatacttcgtctactatacatggtttgacagccagaataataatgtcggcttccgatatggcatactgattctctgtcattatgcgtatcgcaggaaattgtttgtgcagattttctagcttgtctgtatgaggggtagaaatgataatatctttttcgttgtagagatgtccttttgccagacaggcagcaactgcgctccctatgtttccggctcctataattgtaattttcatgtttttatggatttgtatttattactttgttaatcaggctgaaagtctttcaagaaaacgctgtgacagcgaattgagtaattgcttcttatcagccgtgtgaactgatattgtgaaacaatgatcgctgccgccataagaaatcagtgatatggggatatgcctgattgtttccatgatgttactttccagttgcgtacgttcccaatgaagtgatcctatgatatgtattacggacatattttcgtcaacaaccatttctgtgtatttgtgcagttctctttgaattattcgcagggtatcacgactggctgtcagaatcatggagacagaaacattggatgaggccattgagataacgtttatctgatatttattaatgacttccagtaatttgcccatgagtaaatagccgggcaggacgttcaatgacgtgaagcgtacaaacgtcactgagtcttggacaataatggctttaacactgctttccgtatcatgggaagagatgtagagccgttctgtttccaggtcatgggtgtctattaagcggataacgatattggaacgggctgcaagagtgatacagtctgtataaattaagtgtactccactgttaatcaactgttcggcttcggtgtaggtcagagaatgttgttccctggcacagttccggttggcatagatattcgtgagttcggttgacagaatgatttcgtctgcttcgaatatgctggcgagtacggtagcataataatcattacgcttctcattcatgaaatcaatttcgccatatacatttttgcataaggaaagaggagcgatgaaaatgtcagtatcccgattctcattgatatactgcctgatagattcctgaatgtaggggatatccggtttcctttccagattcatctgcataaaagtaccggtatccaatgtgcgggcattcagtccatgctgacgcaggcagcaggcaaacaattctccggataaccggtatatttcggcttttattattttatcaattaataaatcggctttgtcctccaccagtttgtgcatcttttcgatacattcccggatatatttctttatatccgtatttagtggcaaatctgttatgaggtgatctgccagtgtgcagcaatattcttcgatattattgattgttgtatgcgaagcactgtcttcttcgtgaaaccagctgatagaaatatcctgcagccattcttgtagttgcgtcagtgtcggaaccacaactacgtaaggatgttcctttaggatgtaattgattacttgtctgatttcatcctcttctttcattttttcaaatttgcaaactttcattgttatctgataatttattggttactgatcttttcaaaatgatatgccttttttcaaatagagatggtctgttgccatcgatctgctatttgattatcaggtatgttgttcagaatcaaattattaattctattattcccgcttctgaagcagtccattactagatgtaatctgctaataccataccatattaggagatgatataaaaatgactatctttgtagcgtgattaatgaactaatagtatatccatctatttatgaaactctgtatatagctacgctcaacgaatagcatcctttctaatcaggctattcagctatccggtaagcaacgacccgcttgccaaagagtttttatacccatttttatgaatttacgaaactgtgtactgctatgagtgtagtatgctgtatcgtgctatttttagttgagcaatgaaatatacatataagcaaatatggctcatcaactttcctgtgatgatgagcattctaatggagcaattaatcaacattaccgatgctgtctttttaggacacgtaggagaaatcgaattgggagcatccgcacttgcgggaatatattatttagcgatttatatgctgggatttggattcagcattggtctgcaggttatgattgcccgaagaaatggggagcagcattacaaagaaacagggcgtaccttctttcagggattatattttctgatggtgatggcaatcatgctttgtctgctggtacatcttgtttctccgtttattctgcaacagctgattacttctgatgaaatttatcaggctgtgatccgttacctgaactggcgtagtttcggattgttattttcgtttcctttcttagctttccgggctttcctggttggggtcacgaatactaaactcctctccggagcagctcttacggcagtctgtatcaatattcctttcaactatttactgatattcaaactagatatgggcatatccggagcagcgatggcctcctccattgctgagtttggagcgtttctcatactcttgttatatatgtgtaaaacggtagataagaaaaaatatggtctgagtgccgtctatgatggcagattgctgatgaaactactgcaactgtccgtatggagtatgcttcatgcttttatcagtgtcgctccctggtttttgttttttgtggctattgaacatttggggaagacagaacttgctatttccaatattacccgaagtgtgtctaccctcttttttgtgatagtcaattctttcgcttctactaccggatcgttagttagcaatctgatcgggggaggacaggggaaggaactttttcccgtttgccgcaaagttctcagattaggctatgtggtagggcttccattgatactgacagctctttggggcaatcaatggatcatcggattttatacaaataacgattatttagtaaaacttgctttctggccttttatagtcatgttgttgaattatgtgtttgcattgcccggatatgtttatatcaatgctgttacaggtacgggaaagacaagacttgcctttgtctttcaactggttactatcctgatctatctgatttatctatatttgctgagtgagtgttttcatgcctctttgacggtgtatatgacggcggaatatctgttcgttattctattgggaatacaatccattctgtacttgaagaggaaatccaaacagaatatgtacttttgtactttcaatgattgatactttctcgaaatgactgaagatataaagaataaacttttgatgtgtgcagaggtgtaccattgtgcaggctttatcgcaagtgatccggtgcagttccctcatcgttatacgctgaaacaagatatagagattagcggactgctgacggcaattatgagttttggcaatcgcaagcagatattgaagaaagcggatgagttgcataagctaatgggaacttcaccttatcaatatgtattatcccgccggtgggaggaagattttccttccggggcaacccatagtttttatcggatgctgtcgtatgctgattttcatggatacttccgtcggttatatacggcctatacgcagttcggaagtttggaagatgctttgaatatatattccggaatacctatggagaagttatgtgcatttctcgaagtttctgccaaaagtcctcaaaagaaactgaatatgtttttacgttggatgattcgtcgggattcggaggttgatttgggtgtttgggagagttttgatcgtaaagacctgattgttccgttagatactcatgtctgtagggtagcttattacttcaagttgacggatacggaaactttttctttgaagaatgcccgtcggatcaccgctgcattggctgaagtctttccggatgatccttgcctgggtgattttgctttatttggattaggagtcaacggggagatttgagttgcagaaactctatagaagtatcaatcaaacctctattaagttcgacatataaaacgggttctgtttctgctgattcgttttattttttgctccagattcgtgtattaagattcaagtcctctacaatagagaccaatgcatgaatcatgctgaaatcgtttttgagctggctaaggtcatccatcggtttccagatgctggcttcaaaatgatttcttgattcaggaatagctatcagaatatttgaatctctgaaactaattgtgatgttcttattgaattctctgtctagtgcaagaagtcgttccatcattgaaggagaaagaaggtagcgtgcttcaatctggtctgtagagtaaacatcgaatgttttctcgaaatccggattttccagtttcacccgcgaaccgctggagcttagtttgaacaggctattccttaaaatagtggtatgtccctgaaagtctttctgaaaatcggcaatgaaaaagaaacctttaaagatatctacccaataatgacttgtctgtccttttgaattgacacgtgtttttcgttcttcggcatgaatttccgcacagcagaagtccgtttttcctacacgtccctgtatcagatcttctgtgtgataacggtcgggagaagtgaacagggcacagttcctgaatgtactttccttgattccctcttcgggtgtgaagacggcattttcacaaaaagattgtaatatttgtgcgattacttcctgtttataataggtggataactcctgcgatttggcatttatacaactgtagtatgccaacaaagcaagacctgccgcaataccgattccaataagtgctacatgggcataaagggaaaatgcaataccaatcacgagaataatccctcctacccatattccggtggaatgtccttgcttttttagttctttgcgtttctgttcaagactttgcagagtagaggaaagactttgtaccaatgtctcaaattgcggactttctgccatattatatattgttttttactgattcaacaagttattcacattcggaacagtacgttcctgttcggaaatggagaatacgcttttgcgtgtgaaaccaaacataccggccaacagatttgacgggaaagtctgtactgcattattatagtcagtgacgcaagcgttaaaagttcggcgtgctgccgaaagctgctcttcagtttcgttaagcgcacgttgtaactgttcgaagttttcagacgctttcagttgcggataattttctgcaatggcaaaaaagtgtgtacaggcttgtgagaaagcagagtccagattttctttatcctgattagagaaagatgcgtacgacttgttgcgcatttccgtaatctgtgcgaatgtgcttttttcatgttctgcatattctttgactgtagttaccagattaggaatcaagtcgtatctctttttcagcattacgtcgatggctgcgaaagcattttccgtctcatttctttttcgcaccagtgagttgtaaatagcgatgaaaatcactactactacagctataataattagtatagtcataactatatgtctggcatcctcttgccgttttctatatttgtgaattcgaagtggttttattgcgtcaaagataaagaataaaactggaaaatagaacagtatttgggagtaaagaagaatatatagcggaatatttactgaatatatctgacagaaaccgaataaaaaagaatttccgattatcatcataaaaagcagatgtggaatcgacttttacaatgataaccgaaaattcagataaatcatcaggacgcttgtattttgtttgtgtagtcttgccaaccggctgcggttttatatttctctacagattcggcgggaacacgaatgacagtaatgtcatccggaaatccgtaccatatcttttcaaatacttgtgggggtgttatcccttctaccttgacttctttgatacctgtgttattgaatgctgaaaaattaatctgtgtcacatttgccggaatggtcagttgagtgacttttctgttaccgcccaataatccttgtcccaatatccggatactttgtggaatttcgaaacgtgttaattggggacatccttccagacagtaagggtgaatcatagcttcgggatcatcattgaaaacagttccgtaagttgtcacttccgttaattccggacagtaataaaaggctctttgcgctatgtttgtaacaccattcggtaacttcacggttgtaatgctactttcccggaatgcttccagcccgattgttctgacgttctccggaatctcaatcgttttcagttgagacgtcttgaggaatgcctgtgcatcgatttctgtcaacgtagcaggtaataacacttcttcaacgcccgcatatacaaaggtgcttgcgggaagtttagtgagtttagtccggcttaaatctgcttttttaaggtgatagcaatagtagaatatgttttcctcaagctgttccagagtcgagggaaatataacttcctgaatagttgaattgaagaaagccatatctccgatggatttcagtccctcattgagtgtcaccttgtttattttactgccgttgaaagcgtttttaggaatggatttcacgctgttggggagtatgatttcatcgtaccctttcaggacttctgtcagaactccgttttccacacggacaggcgccacctgaatagtaaagcttttctgctttccttctattgttatggtcacttcctgtttgtcgacagggacagatgacgagaaaccactgatctgttttggggcaacattcacggaccgttgtttcccatcatcatattcacctgtcactttgagtccagttaagtctatactctctcctaatgcataaatcgtttttgcaggcagctggtctatggaaaaacgttcaagtaaggctcctgtgggttcagatggttgctccgttggaggcagttccttcttgaattcatcgttttcagtgctgcaactcagtaatgtaagtcctgtcatcatttgcaggcaaagtactattaatatattaagtttagtttgtttcattgtgataaaagcttagttagggaattgggttaaacgtatttctattttcactaccttacctgcttctacggttctgccggaagaccatatctggtagttatcaggtccgccaccttcttgtaccacgaacgtaaagaaccgctgcgactgtgctgcgaaccattcttcttgcggtaaaataaaggtggctatcccgctttcattggttcgggcaaccgcagtaggtaaggtcagattatctttctcaaaaactttataatctttttcattatacatctttacgggaatacccgttgcaatttttccattttcatcataaacgacaaccactactttagcttctctcacttcttcgtttcctttttcgcacgctatcataaaaagtatgatacctagcagaataacaatctttctcataatcttctcttttttcaattttttcgaatgcaaaagtagtaagatcatatcatttttgagttatggtacgatcttgtaaatctaacactggtgttttaatagtgttgatattcagatagttattttgaatgggttctcagatttctaacactggcctaacacctatccgaaaagtgataaaaacaggtccttgttagcagtctctgctgatttgatacgtgatttaagtcgtgacttccgggcatatacattggctaccgtatctttcatgaacaggcttattacttgtggtgaaaaacctacaaagatatagcagagtaaccgaatgtcagcttctttcattgcagggaaatcattccggagtttttgcatggcgttgtcatggcaggtatttacgataagctccagttcttgcagcatttcattgttttctgcaaaatcggtgattatttgtttcacttcgtggaacatggcggcctgttgtgatgcggtattctcgcgttcgtagtaagtttttcccaatttgtcgataatgtcaaaacgagaggctatcaatccttttagatggttttcagtattgcgctgtccttccatgcgttcggtcagagttttatactcggaattagcttcttctgccagtagcagatagcggtcggtgcgttcgcgttgcagtcgcaggcgttggcgggtgatgtaataagccactcctatcatcagaaggattacagttgctgctgcgatttcccaggtagtacggtttttcatccggtattcggcaaagtcagtccgttctttaaaatattcgcgttccaccatgccggcggaaaactgcatgtttgagcgtgtcagcgaatcagtcagatagatataacgatgtatgttatcggttgctttctcaaagttcctggtttgtgcttcaatacgatatgcggtatattgcaggtcggccaagtcacggatgtcggtagtctgtgcttctgcgagagccagatagtagcgtgcgctgtctatacgatttttcagaaggttcacatctaccagtgtatggtagccgtacagggtatcctgtcgggcggaaagctcgatgcgttgcagcaagtcatgaggaatttgccgcttgcccgatactacataaagagaggcaaggttcgtgaggctggcttttgccaggtgatcgttcttttgttcgtcggccagatcaagagcggcggcgtagagacgcattgctttctctatgtctttcgaatgaaaagctgcggctgccatatcaagtgttgactccgtttcttcacgtacattatccgactgccggaagttattgcgggcttcacggaaataatgataagcccggctgtagttcatctgttcataatatacttcaccgatttgcccgtataacagtcctgtataataaggttcattggtgtctttcagtttctcttctattttgagaaaaaggcgcaatgctcccggtttgtctcctgcccgtagtttgattcgtccccaataatagagagtcttacattggtgtcgtaaatctttggaatagtgtttataatggctccaagcctggcgaatcagtgaatcatccgttactttaatatggtttttatctaatgcttccgagtaaagcaaggcatatctggcctgttcggcctgactgccttcctgtctgagctgctttaatattgtcaaggcactgtccggcttgttttgtaacagagcttccgcctcgtcaagccgggaaatatgttctctattataacatcctgtaaaaaagagaatggctgatagtccaagtataattctgcatttcatgctgtgaatgtagtgaaaatctctcggatttgaaataaggagtagtgcctttttttaatgatgactgcattgacacattattttttatcattgtgattccatatgcatcattgtcatattcatagagggcagttccccaatatcatcaaagcggtatgtgctgcttttgcctgttacaatgaatcctttgtcattattggaaaaagactcttctagaaagaaaaaaaataattttagtctcacggtctcactgtggaatatctagtatgctgacaatcattaatataatgaatgagagatacctttccgaacaggtatctctcattgtttttccatcaaaaccactagttttcggttatctctcattgctatctctcacatcaaagtaagtacataagatgtggtccgctatatctgtttaaaaccagcagttgtttgtatgttaagtcactgtatcctagatgttatcctatatatcttattctgttatctaaccgacatcttcatcgttccacccgggtgaacagatcattgcacaataatgaactggcttattcacctaggtgatagagactgttcacccgggtggaacgatgaagatgtcggttagataatacacaaactttagttgataaacaggttaagccagggtatactatatgcaaagaagcggtaaacgggcaaataaccaccatcttgatgggaattattcgatgaaccgattgggtatcccgctataggtcaatgtgattttatgcatcgcccttgtcaccgccacataaagcatacttttatctatggtggaatgataattctgattatcagcttgtggaacgatcacttcatcaaattccaacccttttgccatgtgtgcggaagtgacaacaatgccttttgtataagctgaacttagacttgacaaaaacgatatgttatctgtatggacttggagtttctgagcaagcgcttttgcctgagtttctgttttacagattattcccaaagatgtatatccggagtttctgaagtccgataccaaattaacaatgcctgtcgtttcttcttctgcattcttgaatggaaaaatttcaggttgttctccatgtcgcataatgggttccagttcattgtttgcctgaattttctgcgccagactggtaatttcaaaagtagagcggtaactcttacatagtttcattacttctccggtggtaaacgctttttgaatcatggcagcagttgaagaaccatagggattgacagattgagaagcatctccaagaattgttttccggcagggataaagtttttggatcaccttgtattgtatgggagaatagtcctgcatttcatctatcagaagatgcctgatatgagtttgagttctatttccatccaatgcgaggtgcagataagccaggggagccatatctgcatattccagcatacgattctttcgcatcttgaacatttcaggttttccggcccattcgaaaaagtctttatagatctggaggtcgttatttcctgaaaacatattcttaatttcttttctcagcagatttttctcagcggtagtcactgtaaggttatactggattttcatcatttccagaatgtaatctgtcatggtttcaaatcgttggcgtatggggtaacgatggaatcgtttgaactgttcccctacgaattctgcgggaatagtgatatacttggtgagttttacatcagtcgctctgaaatagtgattttccatatggaggatgaatttgtccagtcgggaaacaaattcgaaagaagctttgtattgtatccgttcgataaaatccggagccggcttttccagtagttccgaaacttgtccgaagaaattctgatacttatatttgttatcgaggacggtggagagaatttgttccatgctggtttccggtacagtcgtttcaccaagttccggaaggacattggatatgtaatcggcaaatactttattaggtgagatgatcagaatatctttggatgaaatttttcctttttgtgcatagagcaggtaagcaatacggtgtaaggcaatagacgtttttcccgagccggcgactccctgtatgatgagtacgggcgtatcttcgttgcggataatccggttttgttcgcgttggatggtcataacgatgtttttcatcttgtcgtctgcattggaacagagctctttttgcaggatatcatcatgaacagtgacggaactttcaatcatatattccatcttacctttgcgaatgcggtactgacgcttgagtgaaatctctccatgcacttcacctgacggagaagaataagtggcctcacctgactcatagtcataaaacatacccgaaataggtgaccgccaatcatatatcagatttcttttgtttttgaaatcgtagaatgtgtgtatacctatatatacaggaagttttttgccgctgcttccattttccttaaagtcgattcgtccgaagtaaggaatatccaatatcttactcaggcgattgcgtttgtctatcacattttcgcctcgtgcaaaatgattcagtatactttcacgcatggaacggatttcatgaggatcgatgtctttattggaccatagataatctttgtattcctgcagagtatctatgtgctctttaacagacttgtctgtgctgtttatcgtatcattgatgatattgagcacctgttgcaaatatgctttttcctgctcttctgtttcgttgaatatcatatataaattcagtttgggtattaaaagttgattgaaagggtggcaaagttagctagatccggtggggtattaaatagttatttatagctatatatcaagcctttttcttatttttgcgtgctcatttaatctagaagaaagatggatatccttgatgttgcaagacgaaatcagcagaaagcatgggaaataatagagaaagtcaatgttatcccgatatgggaaagtattggtgcacaggttaatctggttggttctcttcgtatggggttgctgatgaaacaccgggatattgattttcatatatatacgtcttctttaagtttagccgatagtttcagggcgatggcgaagctggcggaaaacacgtcagtgaagaagatagagtgcgtgaatctgctgcatactgttgaggcgtgtgttgaatggcatgcctggtatcaggattcggataatgcactctggcaaattgatatgatacatatccggaaaggttcccgatacgatgggtattttgagaaagtagccgaacgtatttcttccgtcttgacagatgagattaagcggacaattcttcaattgaaaaatgagacacccgaaagtgaaaagattatgggggtagaatattatcaggctgtcatacgggatggagtgcggacttatgccgggtttgaagaatggcgaaaagagcatccggtgggaggagtgctggaatggatgccttaatcagcttaatattcccgtctcatatcctattcggatagcttcaatggaattttgtactcctaatttccgtaatagattctgtcggtgaatgttgacggtatgaatgctgacacacagtctgtctgctatttctttacttaacagtcctttttggatcaggcgtaaaatttcagcttcccgtttggtgagaggactgaaggtctgcggtgacggagaaggggagaacatctctccatttttcagattgagtacagtacagtctaccgtttcggactcttgctgatcaggcgagatatccatattcccgattaccagccatgcttttccatcgatggtctgctccagaacctgatgcctgctgacaacacgcacgtattgttgcctcgtattgagaacacgaaaactgtaaatattagaatagtcatttcgttgttccggaggcaaactgtatataaactgacttaattttatttgtaagatgagcaattgctcgcggtcgtcgggatggatgcgcgattccagataatcaccctgcctttccaatgttgctatcttgtgggcatcatatcccagtaaatctacaaagttcggagaagcataggcatatctgcatttatatacgtctactacaaatgtacagttccggttcatcttcgagaattgatgaagcatggatttattccgttcccacacggcatagtcgatgtcggtaaaggacaaacgttgctttgcccacaattcttcccgtgtgatatctgttagcttgatttcccgcatgtatggaactgtttttttgattgaagtatgacaaaagtagatataatccgtgatattatcaaggaaggagtagagatttgcttattcttattgtttccatacaataatcgtgctaacaaatgataattattgaacatctcttgaaaaataaataataaaaagatagttatctaattaattgtgttatctttgttcccagagtttgagtcacgaatcattattgtgtagttcttctttataatatattattagtaagtagtcctcttctgtaattatcctcctcactccaaattagtatttatttttaataaaattttagatgaacatttacatttcaggtttaagttatggcacaaatgatgctgacttgacaaatttatttgcagagtatggagaagtttcttcagccaaagttatttttgatagagaaaccggcagatccagaggattcgctttcgtagaaatgacgaatgatgcagaaggacaaaaagctattgacgaattgaatggagttgaatatgaccagaaggttatttcagtgagcgttgcacgtcctcgcgctgaaaaaccgtcatacggtggtaaccgtggaggtggttataacaattcaagaagatattaatatcagaataaataaaagcagaagataatgtcttctgcttttatacagactattaccgtttcatgattcaacggaggaatttctgttatacggagaaaacgaaaaatcattttacatttaagttctgctaattctgcctcttttatgcgcaatatcaggagtatataatcctgcactttccattctgacaatagattattaggcttttttgtaatacaatgctcttggaagaaacaggagtgagagtttaataaataatatccaatcaagcgaacagccaatgatgaaggcgactttgaatacttgaatagagtatgttcggagtgtgttgattttgaaatggccaagcacagaataaaatatatgaaatcattttttataggaaatattgaaattaaagtacctgttatacaaggtggaatgggagttgggatatcattgtccggtctggcgtcagcagtagcaaacgaagggggagtgggagttatatcgtgtgcaggtctggggttgctttatcccaaagaaaaaggcacttatacagaaaaatgcatcagtggcctgaaagaagagattcgcaaatcacgcatgaaaacaaaaggtattattggtgtgaatgtcatggttgccttatcgaattatgctgatatggtgcgtactgcgattaatgaaaagattgatgtgatattttccggtgccggacttccacttgatttgccttcctatttgactacggggagtattacgaaattagtacctattgtatcttcttcaagagctgccaaaataatctgtgacaaatggcaaaagaattataactatctgccggatgcgatagtggtagaaggtcccaaagccggagggcatctgggttttaagaaagaacagctgcaagaccagaattatgcgttggatgtattgattcccgaagtagtggcgattgcggccagttataaagaacagaaacatattccggtgattgccgccggtggaatttcgacaggtgaagatattgcgcactttatggaactgggagcttcgggagtgcagatgggaagtattttcgtgacaacccttgaatgtgatgcttcggaaactttcaaagaagtgtatattcactccaaatccgaagatgttcttattattgaaagtcctgtcggaatgccgggacgggctattgacggagaatttattcatagtgtgaataatggtctggaaaagccgaggaaatgctcattccattgcattaagacgtgtgactatacaaaaagtccttattgcattattaaagcgctgtataatgcggccaaaggaaatatgaaaaaaggttatgcttttgccggtagcaacgcctttctcgcagataaaataagcagtgtgaaagaagtgatgaatacactggaacgcgagtttttcttagcgactcacaaactggtttaatatcggagactttgcatattcagtattgaatgtggcatgctctcttactatatataaaattaaccgctgtgctgaaacagcaaaaataacatttatgacatttaaagaattaaatataaccgaacctattttaaaagcaattgaagaaaaaggatatacagtacctactcctattcaggagaaagcgattcctgtagcattggcaaaaaaagacattttaggctgtgcgcagactggaaccggaaagactgcttcatttgcaatacctattatacaacatttgcatctcaataagggagagggcaagcgttcggaaatcaaagctctgattttgactcctacccgcgaactcgcattgcaaatcagtgaatgtattgaagattattcaaagtatacacgtatccgtcacggagtcatcttcggaggcgtgaatcaacgtccgcaagtggatatgctgcataaaggaattgatattctggttgctactccggggcgtctgctcgatttgatgaatcaaggacatatacgattggataatattcagtattttgttctggacgaagcagaccgtatgcttgatatgggctttattcatgatattaaacggatattgccgaagcttccgaaagaaaagcaaacgttgttcttttcggctacgatgcctgatacgattattgctctgactaattccttgttgaagaatccggtgaagatttatgttacaccgaaatcatcaacggtagattctataaagcagttggtttactttgttgagaagaaagaaaagagcctgttgctgatttcaattttgcaaaaatcggaggaccggtcggtacttatcttttcgcgtaccaagcataatgctgataagatagttaaaatattgggtaaagccggcattggcagccaggctattcatggaaataagagtcaggcggcacggcagtccgcattgggtaacttcaagtcgggtaagacgcgagtgatggttgctactgatatcgcttcccggggaattgatattaatgaactgccgttggttatcaattatgatcttcctgatgttcccgagacatatgtacaccgaatcgggcgtacgggaagagctggaaatgcaggtatggcacttacattctgctctcaggaagaacgcaaacagattaatgatattcagaaattgacaggcaaaaaactaaatagggctgattttacaatttaaggtcattcccttacattattcattaaaatatagtataaattaaatataagttctatggcaaaatccattacggtaggtaaacgtgaaaatgaaaaaaagagactcgctaaacgagaagaaaaacaaaagaaaaaggatagcaagaagttatccagtaaaagcagcttcgatgatatgattgcttatgtggacgagaatggaatgataacttcgactcctccggctgaaaacattaaaaaggaagagataaacctggatgagataatcattgcaactccgaagaaagaagacgaggaacccgttatattgagagggagagttgaattctttaatgaggcaagaggctttggttttataaaggaccttgccggagttgataagtactttttccatgttaataatgtcgttggtaatatctcggaaggtaatattgtaacattcgatcttgaacgtggtgtgaaaggaatgaatgcggtcaatatctgtctcgaaaagaaaccggtggagaattaaaacaaaaacaaaaaatgtaagtattgaaacttatttttagatattcatttgcttaagtgtaatatgataaaataaaaatcccttgagtctcagaggttcaagggattttttatgcgtaaaaatagtattgcaggcagacaggggaacagagggtaaccggaagaagaatgcagtatatcgtacaaaaatggcaagaaataatgattcattatctctactatttcatacctttgcccgctgagtctgaaatattattaacttttaaacgcagaaaacatgaagaacttattgattacggtattttttctcagcttgactttgcagctctctgctgagacaggaggaagcaatgctgtaattgtagaaaaaactacagcaagtccggcggaaaagacgcctgtttattggcagaaaatggcagatggtatgtcgcaagcccttatcaagcatttttggggcgcaaacttcaaagggtatgagaatcggttttattttaattatggtagtgatctttccaatatgactaccaatcattattggccacaggcacatgctatggatgtcatggtagatgcatatatgcgtaccggaagcaaacagtatttgaatatatacccgttatggtgggaaggtgcaccgaaattcaattttgcgggcagagaggaagacccgtggtggaatgtgtttgtagacgatatggaatggattgctctggcacagattcgcatgtttgaaagcactaagaataccaagtatctgaaaaaggcgagacagacctacgatgattgggtttggtctacttggggaccggaagatgaggctccgtggtttggtggcattacctggaagacggatgtggcaaaatctaagaacgcttgttccaatggtcctgctgcccttattgctgcccggttgtataatttttacgatgctatgggtaaaaaggccggaaaacccaaacaggcttatctgaatgaggccattaaaatatatacatgggagaagaataacttgttcgaccgtcagacgggggcagtgtatgacagcatgaatggagaaggcaagattaccaaatgggtattttcgtacaactcgggtactttcctgggagcagctcatgaactgtataagataaccggtgataagcaatatctggcagatgcagtaaaagcggccaattttgtgattgaccatttgtcgaccaatgaaggtgtactctccgatgcagaaggtggtgacggtggcttgtttcatggcatcttcttccgttattttgtgaaactgattaatgaccctgcactggatagtgccaattataataagtttcgcgactacataactcattgtgctacggttatggcagagcaaggagtgaatcagaagactatgttatatagcggtcgttggagaaaagcacctgctgatgatgagagtgtgggattgacatcgcatctgaccggttgtatgctgatggaagctatgtgtgtacttaaacaccgatagagtgaataagaaaagagataaaacaaaaatcccttgaacttcaaaagttcaagggatttttgttactgagttgatagtggtgccaccaggaatcgaaccttttgcttcggtttattctaactccttgagtgactgcacattttttgctttatcttttatgaaaaccattgaattggccttacgctaaattcattgtttttctttactaatctgacaaaatttgtctctttgacactgcaaatataatacacaggttcgatttctgcaaatattttcattccttttaattatagttttcaacaagagaaaaaaataaaaacatgtgctaaatcaaatgcattaagaatttatttattgtttggggtgttgactttaaagttggaaattttgcttcgcaaatcattagaaagatataccccttgaatctttattttgcatgaataaaccaaaagcactaaaagagcaaaaatacaaatgacgactatttcactaggcgccaaaaagtttggaactgacttgggcatgaaggcacctgcaaagagatctactaaacataagattatagctcccacctttcctaaagcactctttacctttcttgatttttgtatctctatatcgcttacaatttgtgcaatcacagtattattggttttcattgcatattctttcaacgtaaatatcgaaacttcttcattattaaatagaaaaatatatttcccaattaagggtactgctagtgtacataatgcaaagaggatacaagtaaaaaatttcacagtccaaatacagacaatacctaatattacgaatggaatcaggtttattagagttaaatcctgaaacgtaattccaggttctttttggggacaacacacacctaaatacaaatctgtaaacaccaatagaataaggaaatttgtccatatatccgtatcataaatcttgtggttgtcaaataacgcaatcaaatctttcatgttgttcataaatacttttttaaattaatagtttatagtaaagcggcagtcaacattttaaatttccactgtattaaaatagagcctatactgaaaaggaacagggctattggttatcaataccctaaaaccttattcgatataatgtctacagattataccattcaaatatattatgtgttattggattttacaaatatacagatactattcagaatgtcataacttctccataaatattattttgtacagtttttttacttataattcatgcctttatcatactttgcggcattgctgcatgaaggaggtgtgcatgccaaaacagaaaagtttttgagccattcatgtaaaaaggatatacaggatgtcatctgatgacttttaatgacatctgatgacactgctttttatgtttcggatataaagcggttctttgtcgtgtattaatagtgaactaatccatgaaaatgagatgccatgaacatacaagaagcaaagaacatcaggcttgttgattttttagccggattcggatacaagccggtaatacagcgtgggaacagcgtatggtacaaatcgcccttcaggacggaaaaggaagcctctttcaaggttgacctccataaggaattgtggtatgatttcggtctggggaagggaggggatattataacgttggccaaggagatttatcggacacaagatataggttatgtactacagtgtattgaggataaaagagccgtactgaaaccggttactgtttcctgtccgtttgaaaaggcatatcccgcctttcaagatttgaaaatcattcctcttgccaaccggatactgcttacttatctgaaggaacggtgcattgatctggaaactgcccgaaaaatatgcagggaagcccattttaaacggaatgggaagaattattttgccatcgctttccctaatatttccggagggtacgaaatcaggaacaggtatttcaaggcttgtattgctcccaaggacatcagtcgcatcattagcacgccggaaagcaggatttgctatatttttgaggggtttatggattttctgtctttcagaccggcttttccatctttggaagagggggattatatagtgttgaattctgtcagtaacttacagaaggctttttctttcctttcacaatatgacggcatccgttgctgtctggataatgataccgccgggaaaaatgcggtgcaggcattaaaggacaaatacggaatccgtatatgcgatttttcgcatgaatattccggatataaggatctgaatgaatatttgtgcaggaagaacaatctgctccatatctaatagatgtattgaaaagactgcctgatgatatacccttgtttctttcctgtcatatgtggcaggaggaaacaagggtgatttttcatgtggtgatactatgttaatagtagaatgtggtcagatgcgttttatggtcttttacaatctttacttcatgcatctgtccgtatatctcacgcatggataccggacaatccatcttttcccattcttccggggaaatcctcatgtcggaatgcctgaaacacagcatgaccatttcctgagaatcctcttctgcgaatatggtaccttcatggtcgttgacaaactgtttgagtccatcctcatccttacaggatatttctccgacgtacatatcctcgctcggccgggtgtttttgcggatatggattttgaaccattcccggctttccggctgttcaggtgcgccacactcccacagggctattttcgcatcgtagtaaacctccccgttttcacatgccccgtaatgcccccaatgcttgaaacggccggtagtccatgccttgaaccttacatcgcctgcctttaccaacagacactcaccgccatgcatatcgcatttgataccctctttgtcacgggacacgaatggaacacgggaaaaatcccggagtataatgttatctccatatacggcatctataaagaacagccgggaacgctcaccataaccggaaacaaagaacaggttgtctcctgtccgtggatactggccggagcgtgtcttttcgatgtgttccaccatggtattcactttatctatatcttcctgtacaagtccatatatccgatcataccagtagttcaggcggatgaaagtttctttgctatacttgtttgttgtctgaatcataatttccttattttgtgattaaacatttccggctttggcaaagccggtatttctatctcttacatgtcagacatttgtcttttgctctgatagtgcaaggcttggcgaaaaaataccgcagcgaagcgaggatgattttttcagccaaccagtccgaaggaccgccttgcgcatcagaagcaaaaggctacctttacatgtaagaaatagaaatgctgaccgatatatgattccaaaataaaaaaacgtataatctgccggttctgtaataagaaagccatgaaaccctctctttttatcgtttccatgactttcttatgtttatgtcgtgatacttggaaacgggtattaccaatgatcaaatgtttccaccctgtttttttccaacagaacaagaatgtccttttccttatataataatttgcctcctactttgtaatagggcagcctgccgttcattctgtaatcagccagcgtccttcgtgtcagcttcaatttctccgccaactcgctgtcggtaatgtaacgctctccgttcaggaccggacgaaggtttttctcctgatcatccagcattttggacagggtgcttatgttccgaaaaaaacgtataatctcagggctttctttggtcagtatgaattgagtcataaggattcgggggttacatggtgaatactgttttccaaataacgtataatatcctgacgcctgtaatataccttgcggtctatatggctgtaagggataatcctgcttctccgaagttgcaacagctttcggggcgagacattcataagcatacacgcttcctggttatcaatccagtcatccatactacagatgcctcctccgcatgtttcacgcattctcttttcaacggcttccaaagcctcattcatttccatgaatgccttagcttcgatacatacaaattccataaactctgctttttttgtccggcacgaaaatacgggaagtaaaagtcatgggcaaaaggatgtcatcaaacggcatcagatgtcatcagatgtcagagaccgctctgtttggggaagcaaattaaaagaatggctaaaagtctgtttctttaccggaaaaacagtatttttatcccggacaatctgtccgaaaataaaaaaacaggaaatatggaactgataatcaatgcaacattattactaacggctatcgttctctggatatacggacaatactggagaaaaaagtgcggcaaggtgctatgccaatatgcagcagcctacgatgagcgggaagacagggagaaaccgctacgtcaagccatcatagcaggaaatcctcatgcaccgctgttatatgcgctgacttgtcctgagctgtttgataaagtccgtccgttgcgattgttctcattcgggagcattcgctgcgtgtttgccggctattattttcccaaacgctttgaaagctggctttgtgatgaccagttggcattcgtgcaaaaagtatatgatttcaaggatggaaaagacagctgtacggaatatttttcacaagcattcctgcttctttccactgatgaggatattactgccatgtttatgccgtgcagcacatcagaccgctattacagacgtttctcaggtattgccggttttctggaaacgcatggctatgtccgttcaggactggatttaatatgcattacggaaagcagggagtgtaaacacgcctcagaaaaacgctctgaaataaataccgccaactatatgatgtcaaacgatctgtacggaaagcgcgtggtgattgtcgatgatttgctgaccagcggatccagcctgatggaatacgcccataatctggaaagggccggtgccaaagtggaaggtgctgtatttcttgcccgtacctttcagatgccttcgccggcaaaagtaaaacgcctggtatggaaacgccatctatcagtcctgatccggagaaggtctgacgacctgtaaattgtaaagtttacattcggattttacaattttacacctcgaatttttacatttcaatttcccctatactatttttatatctgtattttattgatttgcagtgttatataattccccgtccaatataaacggataatgtggcatacatttttcactgaacatggcatatactcttgaaagtgcgcacaagaaaagggtattccagtaataacctttaaaaagacaggagaaaattgccatgatgtatatagacaatgaagtgcttgaaaaaatgataatgaccatagtggaaggttttgaccgtatagaaaagaaactggacaggatgggacgcgtgaaggactgcctgaatggagacgagcttttggacaactatgacattgccaaactgctaaacgtgtcattgcggacagtcgcccgttacagggaaaaagggctgatccgttattaccagacggacgataacgggaaaaacttctacagaagctcggaaatacaggagtttttacagaaacgtgggaaaaaagataagggcgggaataccaacatgggaaagttatgctaactttgtttcataaacagttgttatgaagacaaatgccaattcaagatataccgttgcagtccttattgacggggataacgcatcctttgagaggatggaagatataatgggctttgtttcccgttacggggatgccgttgtgagacgaatttatggagactggacgaggaaagcgctttccgcatggaaggaaagtgccagggagcatggattcaggcttgtacaagcttcctcccatgttcccggaaagaacacgacggacattgcactggtcatagatgcgatggatattcttcgggacgggcaggtggactgtttctgcctggtggccagtgacggtgattacagcctgcttgcccaacggatacgggaagccggggtgaaagtgctgggatatggggaaggaaagaccccggtgtcattggtacggtcctgttccgtattcctgtatgccgaccggaaggaaagcaaggcagaggagaacactcccgaattctttatccgaagggatatggagtatttcgacaaggcttttgagcaggcggctgacggcaaagaagaggtttccctttcactgatcggcggtgcattgaaaaaaatgatgcccaaattcaaggtcaggagatatggatgcaagacattgggcaaactctatgaaaagttggaccggtatgagctggtcatgacggaaaagggagtggcaaatgccgtacggctgaaatattaaaccgcatagcaggagtgttccaaaacgtcagtttctcctatacatcgttttatgtatcaggagaaactgacgtttgtgttctataccgggatggggtttacccgtaatgtgtcaagattgagataggctccccggtagaacgttcttccttccctgagcatgcgccacaggacgtcgcatccgatttgtgccaacatggaattgatgaagagatcctgtttttgcaatgcctcagtcagcgagcagctcggtcctgaatccttctccctgatggtggaataagggacttcctccgttatgacgttcatcttgggtataggcaggtattcagtggaggagggctgcggtatcttgcttttgacattacctatcagtacttgtccggtggtctgggcattgccgaaatccatccagtatatcggtgatttctcgtcatcgtatgaacgttccctatgctttttcaaaaaacgccacagaccggtccgtgaacgggtggtgtccgtgcaggtgatgatgatattcgccaaaacggaatctgatgttcctgacggatagcattgcccttttgcttcccatgaaaagccgaaaaagcggttgatacgggttacaagtgccaccgccttgttcagtccgagctcggattcgctgaacaactggcgtccgatgttcgcttccgtgacagtatcggggtcaaaaaccgtcaagtgcaggcccggatgtccgagtgcctgcaatgcgatactcattcttgccagattggtggccacctgcgatccggttccgcccgcaccgattacgaaaacggttacgggatggtggggattgagcaggtatctgtctgtataatgaatctttttcatatcaataagtctttaagttgtctgtccataggtttcaattcgttatagtcaaacggattggtccgtgccttttccgtcaccgaaaccagattgctttcggtgggattcctgcttcctcccaaatgggaaaattcactgagccagaagcgtttttcccaatgctcaaggagttttgagaaagtcatgttttccggaggagtcaacgaggcatttcccaggcagacactgcttcccgttacattgaaaaacggggcaaggaaaagcgggctgtcttctgccggtgcttctcccttataggcaaaaatttccagtctgtcaccggaagccctgtaaatgacaccgggtacatggaatgtcccgtccggaatattcagcctttcggaaaagaacatctgccgttttcccggaggattgtaccagatgtacctctcgtgtcccttgcgtgtatcgcaccacagcatattggtggggattttcccatgcggtacatcctgccggttatccgtatagtattccacaagggagtccataaattcatacgtaacggggacggcagcctccatccggcctctgtcgttgatcggatgcagttcgagataatatgtcccgtgtccatagcggccatcactgtattcgtaagcaatcagtgccgctttgggaaccatcacctgttgaagtttcttagtcagttcattcatgtcattcgttttaaaagttgtcatcaatatagcctgtaaaacacaccaaccatctggaaagcctttccggatagtcatccatctgaaaaagactgtccgtttccggtgtcagtagcttgtaagtgaccggagtaagggcataggtttcctgataatccgaattcatataccccttgacacactccgccaatgtatcatcagcagaatagaccagtatgacctggctttccattcccaccgggggaaaatcgcattcctcttcataagcccaatcgtactggtagcctgtcaataccgggctttccggagtaatcaatgccatgccgtcctcaatcagttccaacagcttcagctctttttccttttttgtccggtaattccgcacagcctcctccaaagacttgcagaacggtttgcccgacatccgtctgagtgctttcatccgttttccagactgataggaatctgccagccgtttgttcgccctgatttccttcggggaagcatcggaatcccggtttccccagtcttccagttcttctatggcaaagtcataacaaaatgtctcagtaatatcgtacagtctgtggtgtcggacaaatagccggatgaactccctgacaatgttcttcaatgatgccgaaagccgttcggtaaaatcaaccggaatccaaaacaaagtaggttccggccagtcatgatggcggaacagacagaaatgcagccttccgtccttcttttccagattgatacactccggtacacactcttccataactctgtacaactcggtaatattcaggcgggggcaaccccctttcctgtatcggaaagggagttttatacccataagttccgcatatcttgatgccgaccggtagagatagtcaaaattttccggagtcgtgagattgaccggagaatcattatccatatcctgatgccaataatccggtgcaaggggtgtgattctaccggtcagaaaagcattgtgcttcccggtggcagaagtatccttcttttccgttccgaggttccccttcggatgtgggacgaacttactgagagaataatcagccgtgccagtccatccttggcttgttctgaaagctgtctgcatgtttccttatccttttttttcttgttcataccgcttaccctttcactccgatggttgtcttgaagcggtaaaccgccttgtcgtcctcccactcaggaccatgtaccgttgccgtagtcagttcagggtaggtcatggaatagaagtccatcacctcgtttacggacagttcgctgttcggatcatccaacacgagctccacggagtccttcttgaatttgaatactctctgcaatcctttgatttcaagtgccatattatttttcttttatagggtttaacaatataccatatccatttgtgccatatccgtcatgcggcattccttcggaaagtccggatattccgcataagggtcctccctgagtagctcccggtcatcctcgtaatccttgtcgaagttatacattgcagcctcctgcaccgttgcatactgtgacggagccggttgttgcatccagcgattgtccgccaattgcggttgcggcacctgtaccggttgatggaactggatttcttgcggttgtggagcagcctgctgaggaaccggttgcggtgcaggttgcctatattgtacgggctgtacttgcggctgtgcaacgggttgcggagccggggcaggctgttcgggcatggacatcggaacttgctcttcgctccggtattgtggcgtctgggctgccatcggttgtggagccgattgctgcaaggatggctgtggatcagttaccggcggctgtaccatgtcgaacagacttccctcggatgccttcttctgcacttccgccatttttttgtcaatgtccgcctgtttgtccggctgtgccagtaccttagcctgcctgagccaggtcaatgcttcggaataatgctttcctgccgtggcatcctcagctttcttcagcagtttttccatcttttcccgtttttcacgggcttccttggactccttttccaccgtaggcttggaggttttgctttgtgaaaccgcctgctctgcctgcttctcgaacgattccaggttggtaaggataccttgcgctttctgtacgggtgcaccgacagcctgcaggaatcctgcatccagttcttccggcgtaccgttcaggatgagcgggacaatgcgttcgccggcctttactcccgaccgtctgggaacgacggcaaccgtcagattgtcgtttacccgtctgatgttgatactcaggtctgtgcctgccgtaatcatttggttgattgcttgaaaaaacataatggtaaaatttaaaatgttatacataagtttccttgaaaaaatccttcaggattctctgcctgtccggattcgaggcgatgcctttcaacggttccagatagtagccgatacgtctgggcccgtctgtcgtacagggaggctgtcttttgacaggtgttgtccggtttgtggcaggccatgcagccggcatgaccggagccgaggatgtaaatgtgtaagttctcatatcttctgcatttgatggttatacaagcatgcccatgacaatcaggacaaggattgttttcaagacaaaggtgaatgtcctgaaggcgagacggaccagtgttccggacataaggaacaggacagacaggtacacgggaatgacgcccttgcagtaaagcaggcatattcccgtaagcagaaccagtgcgaccacttgcctgcagatgttttcgatgagtttcagtttcatgtctttaaatttttaagaatgaataatcccatcgggatatgttttcccgattttataggcctccggcccttggattgcctttttgcgcaaggcttggcaaaagaaaataccgcagcgaagcgaggatgattttcttttagccgaccagcccctgaaaggggccgccttgcggcaaaaacgaggcaatccaagacctttgccgcttaaaagcggaaaaacgtatcttgtacatatataaaaaagaggcacagaccccagtctgcacctcttctgttccgtaccttccgcccagccgtctatatggaaccatgcggctgtccatcttccgaaagtttccggaaaatctcaccggtaacctcatttaccgtttccaatacgccatccagaaattctttctgtgtgagttctccctgttcaatccgtgccagctccgcttcccagccggaggtgagggaggcgtcagccactttcattccgcgtaccgtttcatataaaagaagaccttttggggtcgggataatgtatttgcccgaataccggatatatttacgctccagaagcgtacggatgatattcgtgcgcgtggatgcggttcccagaccggtcttgtccatatagtccgccagttcctcatccgtataaggggcagcgggcagcgatttcctgtgtataaggctgcatcccgttaccggcagcttctcctcccgaaaaagttcagggggtacgggacagaggtcgttgtcttccgcgacaagccgttccctctgaaagataccgagccaccccgcttccagaatacggtatgtacggattcggaacttgcgtgcggcacagaccgcttcaaccgtcgtatattccaccttgcagggcggcatgaacgtttcaagcatcctgccgacaacaagggtgtaaaccagcctttcctccctgtccagttcccccggctgtatgccggtgatgacaatggcatgatgctccgccgtgtcctgatttccggttacgcctttccttgcagcaaggtcgatcataccggcatattgacggaattccttgccggacagcagcttttccataaccggaggcaacatgtcatacacgtctccgggcagcagacggctggaagtgcgcgggcaggagatcagttttttctcatacaggctttgggtaatttcctgcacccgtatggctgtcaggttatggtaacggttcgcatccttctgaagcccggtcaggttataaagggcaggtgcggtgatttcctcagtccggctgttgaccgccgtgatacgggcatatcctgccgccttgcagtcctcgtaaagttccagggcatcccggcggttgcagaaatcttccacatgccgcatctttattatcttcccgttcttgcagaggctgacgaatacgggccagctgtctgcgggaatgtgattttccctttccctgtaccgtccgcttatcgctgccaatacaggggtctgtacccttccaagcgagttgttcccgaaaccgaccgccttgcagacggcatagctcgaattgactccaagaagccagtcggccttgttgcggctgtctgccgccaaaaacaagttgtcgaacaggctgcagggacgaaggttttccattcctttggcaatggcttcgtccgtcaaggaggagatccacaggcggaggcaaggtttcctgcatcccaaaaaacgataaagataccggaacagcatttccccctcgcgggaagcgtcggttgccgcaacaatggtgtcacacgcatcgaacaccccggctatcaccttcaactggagcaccgcattgatgtcgggattccatcccgtgtccgtctttacatgccgtaccgtcagaaaaggaggcggcagcagggggaagttctcccgctccacccatgccgtaccggtatctttcggcatcgccagggaaagcatgttgccgtatgtccatgttaccatgtatccgtttccgctcatatatccgttctcttttctgtcagctcccaaaacccttgctatctctctgcccacattgggcttgtcagtcactatcgctatcatattctttttccttttgatgttccgtaccgtcaggaacggcacggaacgtgagttatacttattgtttcccggtcaaactgccgcctcctccttctgacggagaccgtttatttccataaccggtctgccgttgccgtcgggtaccagcttcagcgtggcatccattgtcaggctgaggaccgaaatatggagtttcagcggaacgatgcccgtttcctttccttgcagcaacagttccatgttgccttccgcttccagttgtttcttactgatacctgcggccttcagaccgtcccagtcgatatcttccgtcttataaatatgacgggtattctgatccgtattcatacgattcgtttttttaggtttgtatgattgattctgtttctctccgggcaggtctatactgcctgcgatgcacccttcttctgctcctgctgttgtccctgtgcggtctccgtctgtgcggcacggcgggaagtgtccctgcggatgtccggattttcctgaaaatactgcaactgcccggaatagggattgactttcaggtaggaactgaaggtctgcccgttgtttttcagcccttcgacaagcaaagtcttgccatcctggaggttcgctttttcctgtgccgtgaacacgtgcccgtaaacctccgccggaatacgcggtgcctgctgctcgttgaatccgttcggcgtgcgtgaatacatcgtcctgccggtattcatatccagcttgacgaacgaggagaattcctccccgttgcgcccgatcatgttttccagatagaccggctgtcccttgcgcagggtttccctgtcttcggcagtcagctgcacgttgcagatttcctttggaatataaatctctccggtttccggattgtgccgcgtgtagttcgggcgccccgtaaccttgtctatcgttacaaaggacgagaaggtgtcattcctgttcctgaacttcatgtcttccaccagaatggtatgtccttcgctgagcatttttatctgggtgggcgagagaggcacgcctccgatggaacgttcgttgaaaatctggtttttcggaaagatgaattccagtcccctgcgctcggcactgtactggagtgtggcatcgaattccttgcctgctttggaagtcataccctccactttgacaggctgtccctccttcagcagcctgatctcctctgcggtaagtttgaccccgctcacttcctgcgggatgtaaacgtgctcctgacggacggcaaccagctcgttggtgctcttgtcgatggaaatcagacagggggtatattcactgccgcgcaggttgagttctgccacacgccccatgttgccggtctcacgcaggtttttcttgtcctcctcgttaaagttaaacccgaaataaggacgctccaactgcggttccttgcgtatgccgtgaatggccagtcccacctgtccgtcctgttgcgggatgagtgagagccttgcatccagtttggctgtcagcaaaccggaaagatggatggtcaggggcaccagtttgttggtcttgtagcccttcagcatggaatcaaggagtccctgctgttccagcgaagcctttgagattccgaccttttccaactcctcccagttgaccatgttctcattataccggtaacgcggtccttgcgactcctgcgctgcctgttgagcctggggctgctgctgttgctgtgccgcctgctgtacttcgctctgttgcaggggttcctgcggttgtgtctctttgtctgccatagctgttttttctttttggtttacactttgttccttcttgttttctctcggacggatttcgtagcgtttgaggaactctttcaccgcatccgtctgctttccctccgacaaatccctgatggcctgcttgttcaccttgtagtcgtggtaggtcatgcggagcaggcggaaatgggtaggttccttgagctggctccaaaaattcttgatgaagttttcgagaatactcgaattcttgtcgaatttcaggaatgagttttcattcttctcgtccgccggaaccgtcttcgcttttccgtccttgtcaatttcactgacagcctgtacaccgaatttcggatcgttcttgttatgaacaagcatcaattccgtaatctgttccaccggaagagcatcacttccggccttcggtttccgggtccgtttgggcttttcgttcgggatcttttcttgtgccataccttttcttttaggggttaatgaattgctttgacgcttcaaaggtatggggtatttccaaataatatgctgattttcaaaaaggtgtcatcagatgtcatcaaatgtcgtcagatgtcataaacatgactgttcccaacggctaaaccgtgaacggagaagaagggaagtgaataaacggaaagagagaagatacgtgaggcagaagggaaaaagcctgcgcatccgacaccagaaaagagcaggcgggcaggcaagacaaaaccatgcagaacagagggagctgaagccccctgtcttctcatgccttccgcttttttacagcaagactttcataagacctgtattccggctggatatgtggaatttcatggattatgaaatacggcctcttcaagcagcccatatcctttatccatgcgtcacatcggtcgcagtttgcccctgtaatcgtttttcaaatcgaatctggattgccgccgcattctttttcgtgaaaattttccacggcgaagccgcaaggaaaatttccacgaaaagattcggcaaatgcggccggcaagacaaattcgattttcctttgatgagggggaaaactgtatcgcaaacaaacctatctggaaattccgtgcaggctcattttcttgtaaagggtcgggcggctgattcccaacaaggccgctgcctgtgtcaggttccctttagagatggaaagagccgtcttgatctgttctatgtttcttctttcatctttctgcaaacacttgtctatcttctctttccccatggggtcagaaacgggctctcccgcatattggagccgtaaggaattgggggtaatcagttttcctttgcatatcaataccgccgcatgaatgacctgcttcagttcccgtacatttcccggccaactgtatcccagcagcatcttctttgccggttcgtcaaaatccaagacctctttccggagcaatccgcaagattgctcccggaaaaaatccgccaaaggcagtatatcctccaggcaattatgcaatgcaggtacggtgatggtaaaatcctgaaagcgataaagcaggtccttccggaaacgcttttccgcaacagcctcctgcaaatcctcattggtggccgcaatgatgcgcacatccatcagcctgtcccgttgtccgcctaccggacgataccgccgttcctccatggcacgcaacagcatccgctgcgtttctatcgaaaggttctccacctcatccatgaacagggtgcctccctgcgcttcctgaaaatatcctgccttttcctctgtggctccggtaaacgcccccttgacatggccgaaaaaggcggaaggtgccagctctttggacaaactgccgcaatcgaccgttacatacggcttgccggatctgaggctctgcctgtgaatcttttttgccaggtgttcctttcccgttccggtgcttcccaatatcagtaccgtcatatccgtcggcgctaccatgtgaatgtaccggttcaactcgcaaaaaggggtgcttttgcgttcatagattaccttggtgaaagcctcgttcaccgtccttatttttttgattacgggcagcagcctggtttcaaccagcggtttgaggatataatcttccgcacccagcttcatggtatgaaccgcagaatgtatctcttcataattagtcatcatgatgaacgggtgcatatagccgttctccctcatccactgcaacagcgtggtactttccccgtcaggcaatcttaaatccgccaatacgatgtcatcctcacggacggatgtcccaatgaccttcttagcctgtgccagcctgtaagtccttacagtatccaaatccgccttctgcaaaaaattgcagatataattacagaacaagacattgtcctcaacaacaattactctcataagctttcttagcctgttgtgccaaacatattatttcttttcctttttccaatacctgctgtacagtccgcccgaactcgtccacagaaaactctcccgaatcctgaagcagtgcgaacaactcatgcagcggcttgccggcatgaatgatctcccatgagcctgtcagatgatgtatccattctttcagtgcctcatgatcattcttttctgcacattcagccatagcctccatatccttcctggtctcccgaatcagggtatccagcatcttccgcctgttcccatatttcagcagggcatcgaggtctatctgttcagactgcctttcacttcccagacattccgtacatacctgcaaaagttcttcggcggaaaacggctttttcaaacagcccgaaaaccctgccgcatacaaatcccccgtatcgcagtttcccgatgcggtactcgcgataaccggaatgctccgtgaatttcccacattggccatgcgcaggagcttcaacacctcgaatccgtttgtccggggcattttcaaatccgtaatcaaaaggtcataactacggctgcggacatgctccatcagatcacgcgtgttctcacataccgtgcaagccaccccgtgatacgcaaacatttccctgattgccgccagcaaaacggtgtcattgtccaataccagtaccgtataggaccgtacggaaatccggctcctgccgctctccgccatcgcttcctctgccacagccaaaggaagacagacagtgaaccggctgcccacccctttccggcttgccacttcaatcctgccgtccaacaatccgaccagaccttttactattgaaagtcccagtccgaccccttcttccgcaatcgcattgggaagcctctcgaatgcagtgaaaatgcgtgtctgctcctcatcgtccattccggtgccggtatcttccacgataagcgtcaatacgccctggtcaaattgtgtgcgaaccgttacacttccccgctccgtaaacttgattgcattggacaacaagttgcttcctatctgtattatcctgtccctatctcctataacaaccgcatctccggcactcagcacgttcagcaaaaggttttttcctgccgccagcggcataaaatccgtttccaaaatctcggtgacggaacataacctgaacgggacaggaacggccttttccccgccactctccaaccggaaaaatcccaacagggaattcagcatggaagacatgtgtcccgccacctgccgtatgttccggctgtattccctgcacttcgacacttctctttccgtggaaagcaattccgcatagctgctgatagaagcaagcggcgcacgcaagtcatgggttacggccagcatgattttctttcttgcctcaatcagttcctcgttttcaagaacggtctgctccaactgacggactgtgccttccagcctttttttataacggtttatacgcatcatatcccggtgtatcaccatataggaccatatcagcagcaaaaccatgaatgccgtcagaccgatgaccgtggcaaatgaccgtttcccggcttccgcaacttcttcttcctgtctcttcaagtccgcttgtaccgttccatccatattctcaatcatctgccgcaactgcacattcagccttctgttcatcccatccaagctgtccgtccgttctgccagcttccgggcatacgcctgctgtctgccaaccacgctccgattaagctcatgaagcatggaggcggcagaaggagaatccgccctgtggcgttttgcgaacaacctcttcaggaatcccccttttggggcattttcccgttcactctgtctggcaatggccggaatcttcgctgcaatttcccggtcggcttcctcctgcctgtgtacccaatatatgatttcccgcatataccgctccttggctctccacaaattacggatgctgtctgtatgtgagccggaagaggagtacctcaagctacacaacaggctgtcaatgtgccgtctccgtttctgaaatgataaaaaatcctgctcactccactccataaaggtttcacagaagaaagaaagcctgagcattttcacgtatatatcatttatctcatgctttttccggttaatcatccgtacttccatttccctagccttagtctctttccattcgcagatgccaacgtaagcaataccacttatgactacaatcttggccatatatcctaccgctattttggcaagaagcggttgcaggcgcaaagatttcaacaatttattcctactttccaattattcactttttaattcattatattctattaaaattctttgcaaaataaaccgaccagtcggtttattttgcaaagataagccttttccaagaataatgaaaaaaaacaggttccagcaagtaaagttttatcatttatcagtctaaaagacaacggaatgaactgaaagggaggaaaaggaaaggaatgcgggcttaaatttctgagaacatccccaagaaagtcttaccaatagaagtgttcaatgcctgtctgctgaacgccttggcatccttcaaacttattttatgaccataagccacattggaaagaaagtcctgttcccggacaagaagttgctgatacatttgtggaaattcgtccatatattcatgggcggaggaaacaaactgcatataacatatcaggagattgccattcagatgttcgggaaaactgtttatcacccgttctatcggatttctgtattgccttaaaaactcattccaatccttgtcagccaaagaatacatttcacaagaaatctgcgagtcggggaaaaaacgcattctgacaaccgcatcaatcagtttctttttggaaggaaagtagtgtatgacagcccctttggatttatgcacggcaacagccacatcacagaatgaggtctgcttcattccttttgtgatgaataacctgtatgcctcctctataatccgctgtttcaaattcgggtccatcctactgcctatattataaaaaaatagcacagacgcaatcaacatccaaacatggtagtggaatacctagagacgaagtgacgcacctgtgctatatattttaatatagcgcaagctgtcatattccatcttgtctctttgaaattttccacttttcgtttggaagatgatatatgatactatactatgtcgttttaacagcgcaaaaatacgttatttatcgtttatttccaaatttatacgacacttaatagcactgttccataagaaaagcgtccgctttcagggacaagcagcagtattttttcaccggatttgagtttacgggtagaacagaactcatccaaggcagccagtattgctgacgatccgatatttcccacccaggtaagattggtaaaccactctcgtttgtacaattcaaaactctcgtttttcatcgcttcaatgagattaccataaataaccattgacgaagagtgaggtattacataatccacatcgtcaggagtcatgccatgtttattcagacatgatttaatatgtctaatccataacggcatcaacttcgtccctaaaagtttaatgtcctgtttaataaccataagggactcatcgaccaattcctgactttcaaaagatttccagcttttcagttcaccgtcctccctccggacagctccggcaaacatacaggtaggggtttcattggcatatgaatccatttctatccattcaatctttaaagatacgcccttttctcccggatgattttccaataatgcacaactcgcaccatcgcttaacataaagcgcaggaagtccttttccaaagccatatatggattggtgcccaaattgcagcatctttcatattcgatatcgaagtttttggataaaagcattgctgacaccaattcagatgtgctgcatattgcattctgtttttctgatgcagctatgctcaaataagctattttcagcgcttgcagacaagacagacaaactccagcagaagagaatatttcaacaggttcttcccaaagcccatgtaccatagacgcatgagaaggcagaatctgatcaggggtcgcagtagcacaagcaagcaactcaatgtccttttggctcttattggtcaatgccagcaacttacgtatagccagcatcgccatttctgcatttgtatgtgtgatttcttgatttttgtttaaggcatagtatcgccgtttaattccattttgctttaaaactatccgttgcactttggaatgttttccagaaatgagtcccaagaactcttccatttcatcattggaaacaggagagttcggaaagaagcttgcaagcccagtaataaaaacatctttcttcattagttcaatttttaattagttcatattgattataaagaactactttcagttcttctattcgcaatccattcaccaatgcatcctgaaaacattttccaaacagcaggattcgaaatgtcaaagccaatgtagaaggattaacatcggatcttatttcttttgtttcaacagccttcacaaatattctttcccataatttaatctccttatttgttatttcgttgaaagcctcgttaaatcccggatagaaatattctgcctgcaaaatcaagttaagatatgcacgtgtaatattggtcttctctttttctatgagatagatcctcattgcattcatcgtttcctccaccttctttatgtaataatcaataaattcaagcagagaggtgtgagaaatgtccttgaacttatttttggcatcttgtttgtgaaaaatgtaaaaatcaatcacatcaataaacagttcttgcttgcttggataatgatatgacatacatcctcttgataaattcagacttttttctatctccttcaggggaaccgtgttgtaatcttttgtcagaaactgtttgtatgcagcttccctgattaatctttttgtttctgagccttttactcctttcataaccttgttttttagtatcatacaaaagtaggtcttttgagtgaaaacacgttcatttttagtataattaaatatgtcctacccaattaccattaaatcatttatgaccatacataccagtttatgaaataaatgccaacgatgcctttttcttttttttcttatacatatattattttttgcttatatttgtcttcaaataagccgattagtcggtttgttcggcatagaggaacccaaacagaaagtggaatttcaaaacagagatgttcctctatgtctttgttattccatcttctggcaaccggattctatccctgttccaccatatccctaaaaaataccgaccggatggtattttttacggcaaaagtataaatatataccataaaaacaaagggaaaggccaattatgcattctatcggcaaagaaatgcctatgaaatatacataatccgcttttccctatgagaaacattatgttaccggcttatcttgaaggcatcttcatcttaacctgcaccccctgtgagtttaaaacacgaaccggtgtcttttctccggctttcaaatagaacagaatataatccttcgcacgctgggactcgaagaaacctttttcgcgatattcggcaatccacctctgaatcatcggaatctgccaacggttcatcaaaatatagtagccgaaataatactccaaatcgctcaggaaaatattgagtttcaagtaatcccaccagaactgttctttctttttgcttttggcattgagtatgataacctgatgttcataagtgtcacgaggattttcccaatcctgttgcgaaacaaatacatcgggaaccacattatcggcatgatcctttgccggaataaagggaaataaggattctattgaatcctttatctttccatataaggacggttcgtactccttgttgtacagcataacatcccgcaaacgggtggaagtgagatgggttaccacggaacgtcctaccacacaatgatccggaacagtcattaccgatgccagacgtttcataaatctgacttctgcttttgcctgttcttccttatccggtctcttgaaaggataatctgaccaggcaatcttccgcatcccccaatgcaggtctgtaagttgcaaccccgcataagcacagaaaatggaagcacgaattatcttgaagataggggtacggtcaccctcgtgggccacgtaaggcaggtcttccacgccaaaaagcatttcattttccgctatcaaatcggcagagaccgtcttgccttcttccaagcgtcccttaatcttgaagttacgcttttggtatccccaagtgtgaacaggtcgcgtagctatcagtgccacacaataattgccgttttgcggcatgaaatctacattttgcggtgttgcattgagcatcaactcgttcagcaacttaatcttttggatatagtccataaatcaacaggttttaagtgaaacattttgttaacagtgcaaatgtaggcatcaagtttcgtaccggagttccgtttttcgccgaaaatcactgcagggtcaaccaattattcaatatttattctgttctcgattctcagtatatagtttgtttccgagaaaaagcgttccatacgtactgcctgaccggttctgaacaaaggtttttcactattggctatgtaggctttttttatgggaaaattccgtgcctcttcctgttgttcaaaataaccaatggtagaacgcaactgctgttcgccgtcttttatccattgattacccttgccttttctttgtttcaactctacaaatataatcgtatctctataaaacaggcagccgtcgcagcggttgtccatactcccgtccgccctgcgcagttcaatgcaatggtcaaccggtacgaaattcacctttacctgaggataattgtccactgccgcaatccaatcctgcccctgtctttctgcaatatatgctttttcagcggcaggagccggccggtcgcatataccgaatttgcgtctgtttgatgatgatatatgttgtgtcgggaagaagtcaatcataattcctgttgtatttccaataaatcggcaaaatcttcgtttgttctctccagcatcctgttgaggaagttctcatcggaaggaagcccatgatatgtgtccagtactgttactgtcccttcgacctcgttgaactcgtaaatagcgatttcgtcagggtgtatggcagcttctatgggataaatagcatttatcctttcttgtacctcacaggaaagattacctacagccaacagcataccggctttgacagcgacggtcaggctattaataaggtatgggctatgtgttgtaactaccaaacggtttgtttccaaagcattgttaaaagccagcaactgtttcattatcatccattgcgattccggataaaggttttgttccggttcttctacaatgttgacaaatgccgatttgttgaatctggcagaaacggctgaaagggcaatcctccgttgctcgtccgtaaggttcggtatgttccatatattcgcaacttccgcttcgaagcgtttcgcttcatcgctgctcatcttctgggcactattcgcctgactttttacagattcggacaaatgtaaagaaaccaaataaagcggtacgatggattggaatccgctggacgcttccatcaacttcaccttatagtcctcacctttgacataaacaatgtcattttgtttgttatattccagttgcgcatgattgataggcagttccagactactcttaatgcgttgtttggctttgtcatattccgtaagaaaacctagcaaggcatccggcaaatccttaatcagattcggtttgttgaccatgctgatgaaattccgttcggcaggaacgtacatgatttgaggaagggcatagctgtccaatgcattctcattcttttctatgacaagttcgccttgcttcgtgtaggtaaacttgtaggaatccccttcgtagaaaatctcagtctgttcctttatgaaataattggaaatacgatggtaaccgcaatacttgttcttgaacttggcggcggtaaattctttctccttgaaatcaccccgtgtcaagaccttctccatccatgtaaaggtggaaaccagtttggcaaccgtacttttaccgctaccctggttacccgtaaaaacggttactttctttatatctatccatccgtccgttacagatgctgtttctttcaacggaccgaagtttttaatcttgattctactcatatatttattgtatagacctgttacaaagatagtgtttctaaatgaaacgacctaatgaatgttgtgtttcatttgcagtgaacatagaggtcttcccaattctttgtttttccaatttttaacctgtatgttttatgatggttttctaatagtcagaagtgtcattctgatatccgaatgtgtatcagtcggcattgaacggacggatttcggaaagattttcattgccgctgtcaataaagcggtcgagcaccttaatcatgacaacaggtatattctgcttccatagtatctgtgcgtccagctctgtacaaaccaatgccatctgtttcaattctttttccaagtatgctcccgaactgatatattcattcagaagaggtttgttttcggataatttgattacagaggcatataacttgtattgttcattgatacatttcaaatgaaacttgtcctttagtgtggaaggcggatcaagtaatttcagtttgggcaggtctgacttgttgagaataatcacagtatttgtaaattcgactgtatgatctccaggcagactatacaacaatctgttgtcaggggatttgaacttatactcgttttcctttcgtaaattctgaggataagcattgtaccagttgaagtggaatccgatgattatctgtttgtcggtcaatcttaaagtctggaaggccttgtcaagattctccggaaaaaccctatattcacttttaggctgatactggaagcttcggagccagcagtttttgaaagagtatagtgtagcagcactgaaagactccttaaaattgacatatcctattgttttatccgtacagaatgcctctgccggcatcagctgacgtattcttccgacacaattgaacttgttacagcttttgtactcatcatcagttatgacagaaacttctgtaatccacttcatttctctgccaatactatctgatgctatttggtaaaaatcctgaatttcatcttcagacagctgttgagtaactttttgatgttgtattgttgaagtaagcgaattggaaagggactccagtgcattcttcagcttatgtttagccctgtatatgcacgactgatccaatggcagtattgttgtgatgtcttccagtggaatggaattctgctcaatctgtttcaggataatcggaacattttccagccattcgttcttttcggataaggattcaggaagagccggcagtgaataaaaatcctcgtaaacataggtgcggttaagtgttgccagacgtaacattaggatatacaagtatttctgtatccagccattgatgatgctattgttgcgtacgccagcctgaagaccaaaaaatggatatttttgctcgtatttgtacattgaatcgggactgaatgagagcaagtccatatacagtggaataatttcagccagtgaacttggaatcagtacataatgagggggttggctattagtgtaatacaatatttgatttaaaagttcatattcttttctatataacaaaagtccacctaatgcgatatgaaactccttaaattctttccgttctttctgcctaagctctaccatttggctgtttgcaacagtttgtccagatgaagtgtagggaacgtttatacgttcatcaagttggaaagatgtaagatgaagaaacaagtgtgaatgggctgcaccccaatatttaagaatccattcgctgcgcttgtaaaacaattgctggttcaaacaagtccaaatcgtacggtaggtattctgatgcattatggtgaactgaaaatcatccagcattgcattgactatatcatttccgttcttgatggaaaccgcttccttttgttgcatgcacagctgctcattaatggagacaatgccttcgtataactccggcggatattccattaacgtccattgtttacctgcacgtaaagatatgatccagtcatacaattcctgatagcaatcgcgcaatacatccacattgttctgtttgagcatggcaataaaaagttcgaaccacgcttttctggtatcttgtgggatattgtttctttttatcaaatgcttttgcagcttttcaggtacattatagatatagataagcctgaaaatcataaatatactgaatgttagcagtacacagaatattgtcgcgagaataatggcagaataatctatgtactttgtaagaactccgaaatcaaaatagttaggtggagcgaccaattgatagaacagtaaaaatatggtaatagcgagcaagccaagaaaatgctttgtgcttctttcgttcataaagagttgtatcaggcgggtagattcatacttatcgtctatccgctgaataactccaattaacaagggaacggcaatgcccagtatggctgccgttataggtataataatttctttagaaaaaatgtccataatataaaaaatgttcaatagttgctatggtactggaggaaactttatgcgtccttctttatcgatggtacaagataaggcttccccttgaatttttttagctatacggttataatttgttgctgttcgtgtttttaaatctaccatttctttccaatcaaaggtatgctctatattaaaaacattctgttcatttgctgaagtaaatcgcatggatgattttacatggatattaccctcttgagaccggacattccagttaaatctgggatgatattgtaattttgcagcgaggcataatctttcgactgttgcctgaattatacctatagtcgtgtttaaatctttcagactttgggagtaataccatttgaattcatcatagatttggtaatccaagggattctcaaaaggttggaacaactggtaaattttgctcaaaaatgatgaatcatagtcatgtaaaaatgccggaacctcctgatccattaaaacacggcagcctttggccccagcctgttccaatttgacagccttacttacagcatttcctagcaacatttgtcccaaattagtgttgttatcttcaatgatatctccgtatgcaataccaccacgacatagaataccattttgcaaacaatcccacataatagtatgacatgaaagtatgacatctttcatgttttcagaccagacgaaagcgcaatcggacaactgggtgaaatttactgtagggtatttactctggcagtttgccaagattttccgaaaaatgatcaaaatattggctgcaaattcctgattccctgaagtctgaaaatgtttagagacctgccaaatattaaaatcgtcttctgtaagctggattttaccttgtgttaaagctgaaaatcctagtatatccacatagaagacaaaaccttttagattattcatgttcataatgttatcgtttataactggttgaattttttttggacattttgagctatactgatgaaacagttgggaattgtaacatattagttgttgcttgtcacaaagatagtatatctaagtgagatgagttaatgggggctttgttttatttttgattttgccaataaatggtatttcctaaaataattttgtatagttcttcatttttattgtaaaacaagttatattcttctttatgtttccatcttgaggctgttttgatgactttaatgagtttattattatcataaaagtattctatagttgaactatcaccataaatattaactccaacatatattgaattctcattatttactatttcaaattttgatatagatattaaattaattacgggtgtattttcattttctgttgggtaatatttgaaataggttttgttatatccatgtttagaatattcatataaactgatatataaaccttttcgtatatctgcatctatatgttgctctgaaataatcattttgttattttcatcgaagccaaatctgaacaagtcctgataattccatttttcaatggtcatgttttttaaaagtctaccttttttttctttattaagtaaatgataataaggtagtagattataatattccttggtcgaatattcccatctatgtacattttttaaatattcttttataagaagaatattattctttttttgtaaacttgttatttttaattttaaatctgttaacataattgtcgatatttaatataaattacttatgaattaatgggttgaattgttccatcttccactttctatttctgttccaattttttgtaattgttttctgacataattgtcttttaaattatcgcttaatttattgtctatcgcatatttctcagcactctctaataattcacatattcgtttatcactttcaagcgaatgtatgtaccctgcatggtaagtaccagtagttctggcagcttctcttcctggatgtccagattgagttacttgagaattagcagtaccccatagagcaactccattttcggcatcattaattcctatgtgacacctttccaatacggctttggatctgtttacatattcattattccgattcaattgaacaatatgatgtggagtctgtccagcagcaacaggcctataggcattttccatagctttttttaatttataagcatgagataagcctaaaatatcaagtgctatgttagtagaattaacatatctatatattgctaaaataccagattttaatcctataggatcttgactcatgtaactaccaattcttggttcataatacctaaaacggttgtagtataatcccgattcctcatccacatattgcccttgaaacctgaatggacaatcaaactccattcctttatttacagtaatcacttttccataaatatctagtgtacaatcccaagttttgtttcctttttcatcgtacatctgaataggtgtacccaaataatcggacacaatagaatattgcttaccatcctgtatctttgctgttggtacaaacgtgcctgcttcgaacacccaggtggtaacatcttctgccggttcttttggaaggatgttttcctcttcgtccgattgtaagccaacggctttatagctccattcgtgtaaaggtacgtttccgtcccacacccagcgtgtgacctttccgaaatactgtttggcggtgcgtcttcccaacgcatcgtaacggaactccaccggtcttccgtccggacgtataaccttctttagcataccattggaactccactcgtagagccatcccgtacctgtagccagacagcggacgccgcgctccttctccatgcgcttgcggtcataccttacgcccgtttcctgcaaccgtttgaactcacggaaaatgaggtttccttcgtcgtcgtagtgatagaaacaatccgggtcttccaacagttttcccccgggaccgtatttgcggtcttttttgtccggtgtctcaaagaggttgcccacgaagtccggtacgcggtaaatcacgtccgtttccgagccctggatggtttcctgccggataaggaagtcgaaacggtcgtagtcgtagcgcatgaccgttcccgtcagctcgttctccttggcgagcaaccgattagcgacgccccactcgtagcggtacgccccgcgctcgatgccgcccgcgcggacggacttgcgcacctcgcgcccgaaacagtcgcgctcggtgctgacggttacgccaccggagaaggtgcgctgcacctccagccccgtattgtcacgcacccacgatgcctgccagctctcgcctgcctgcatggtctgcaggttgccttcccggtcataagtgtgacgaatgtccgctcccagactgctggtgatgcgggtgcagttgccttcgctgtcataggtacggctgacggtgtattctccctgcctttcctctgtaaccagtcccgtcttcctgtcacgggtgaattccagcaggttctcgctgtgtttcgccctgacgagcatgccgtccttgtcatacgtgtagagggagacctccccgtcatactgttcctccttcaggatattgtccagtccgtcgtactggtattccgtccattttcctccgggacggttcacacgggtgacacgacccgcgccgtcgcgctcgtactcacgccgcagaccgtcgaagccggtttccgtaacgacctgtcccagcccgtccagctcgaagaaatagttgtcgcccacctcattgccgatgcgccggagctgcaactcgctgttgtagccgaatgtaatccagtgcctgtcctgctcgcggcttttcaacacccccagcgccccataggtgaacctgacctcgcggatgttgtcgctggcatgtaccatgtttcccatggcatcgtactcaaaccggtgcacgttgccgtccggttcttccagccgtatcaggttgtccgcccgattgtaggcataacgggtaacattgcctttcacatccaccgcctgcacaagccttcccctgccgtcgtactcccaccggcggaacagcccgttggggaactgcagcagctccaggtcgtacctgtcgttgaacgtgagcgtgtaaacccggccctgtccgtccgttatggtacgcaacacgcctccctcgtagacatatttcacagtttctccacccggtgtggtccggctgacgacccgatcctgtccgtcatagtcccatgaaagcctctttccgcacggagtgtagagcgagaccaggttgcggttgttgtcatagtccaggaaggtgtcctccccgttctcgtccgttatccggaccggcagtccgaactcgttgtaggaagtcttgcgggtatagccttcggggttgaccgttacctccagctcctgaaagctgttgtactggcggcgggtaattcccccgttggcatccactatcttgtagatgagtttgtcctcaccgtaataatattcggtttcggcattttccccattgcggatatgggtatatcccttaccgtaacggatgaaatattccatcacgcctccatcgccccatgtatgcacacagcgggcattctcacccttaccctcgtattcccaatggaaggacatacccccttggttggtaagctgtaccagcaggtgcccgccggaatagacgaaatgcttgctgacatccagcgcgtcaatggtttccaccatgtcgccccggtcatcgtaacggtagcggaccagcttcacctcctcaccgtcctgatttacggaaacgcagagcacccgccccgactcgtcggtttccactttcaggaattctccccgtgaggatatgattcctgccagccttccccccgaagcgtattcgaagcggagccggaatccgtccttcgtggaaatgcccgataccatgcggtaaccggagcggttttcgggaccgtcaaaacggtattgcaacccccggatgtccgtaagcatgtaaccccggccatcgagtgtccatgccagctgttccctgcggtcaaaatgggattctccaagtttcagcgcaggcaggaaggactcccgtccgtcagcatgacggaatgcgaacgccccttcctccaactgccgtattcccagattgtagctgtggtgccaattgtatcccaacggaccgtccacggcggcatcactgtaataggtacgttcccatacgacgggaatcggacccggaagctcgaagtccacattggtgtgatagaccctgcccgtagcagcgtccaccggctcaccgaatatgatgcaagctgttttcttgagaatcctggcaagccggggattcaatcccgccttgtctatcaatccatgcagcagatgggatatttttttcccgagctttgacaatcctttcagccccagcttcatcgccagcgcaaacacatcaatggtaggcggtcctcccacaagcacgggatttcctacggatgtgatggtggagagcatggaagtgggggcaagcagggccttgctcaccttcctgggcttccccttgcggggaatcgtcggtattcccacaatgttgcatgagagtgccggatgtgtgagggaggaacagggcgcaccgtccgccaggacagtggaactgcccatccacatctcggactcggacataccgctgaccaacggggccggatgcaatacaaatgccggcagatgcacgatgccgatacctgcctgcgcaatccactggttatgcaccttgaccgacggagccatgctcttgaggatgttgcacgccactccggccactccatcagccgcaggcggcatggcagccgccatgccggccatgaggtctgccatgaggtcgtacaccttgcctacatgaggcacaggcatgatgggagagggaggggtaacggtaggatgcatgtctatcccgatggacaggtcgccgaacttggcgacaggcatacccggcatggaaggaaggattccgcccagacccgcctgaatctcgtccaaagccgccttggaggctgaaaaaaggtcggcaaagccccgtctgacgctgctgctaccggcggcgtcagctatattcttgaacacatccggcataatgaaactttttgattcttgtttttaaaccgattggtcggtctgctttttgcaaatgtatcatttaaaatcaaaaaagaaaaacattctcctactattttctatcaaaaatcataagacaatccataaaaggcaattgatttcaagtcatgtatcaaaaaaacgtcgtatatttgcatctgttgaagaaaaaaggagagtaaatggactttgaaggagaatataccatacggacggcttccaaccagcagacatacgagccgaataccgtatatccggacgcagtgctaaatatagcccgcgaatcggcttccgtgttccaactgaagcggaaatgggaaaaaactcctccgatgctgaatctgacccctgattttcaacggggactggtatggaagaccaaacagaaaagcgagctgatagaatccatactgatgggtattcctctacctctgatttatgtgaaggaagatgagaagggagtgtatcttattgtagacggcaagcagcgtctgagcaccttgttcagttttatcaacaatgaatttgccttggacaaactcactatcctaaaggacaagaacggttcccgattcgcagatttgactccgttggagcagaataaaatagaggactgttcgcttaccttgcatgtgattaaggcacctaccagtgaccgggttacctttgacttgtttgaccgggtgaaccgtggcgggacgcggcttaacaatcaagagatgcgcaatgcgctctatcagggcaatgccacgaaactgatcaaccggctggccaagaaagaggtattcgttgaagctacagaaggttccattccagacaaccatatgaaagacaggtatctggtactccgttttacggctttttatttgtggcagcagcatatcaccatagacccggacacccatgagcctctggattaccgaagcaatgtagaggattttttggggaaaacgatgcgttttctcaatcagctggagccggaaaacggtttgtttaaagaactggatagccggtttacacgtgccatggagcttgccatacaactgcttccgtcaggcggcttcaggctgccttcgttacccggcaagaaacggccgataaacatggctttctttgagagtttcagttatcttctgtcaagattgaacggagaaggggaacaattccatcgtcaggttcaggatacttatatgcaattaatgtgcaatgatgcctatctggattctctcacacgctccgtggatagcggaaagcagacctataagcgttatgaaattatcaaccgacttattcatgaactgaatttatgctaaacaatctgactgtcaacaattataaatgcctggtggaatgttcgttggaattaaaacctctgaacctgttcgcaggtccgaattcatcgggaaaatctaccgccctgcaagccttgctgattgcttcggataacgtgacggagcaaaaaggcaaacacggtctgaagaaccggagaacagaagcgtcgaatttcaatgatgtaaggaactttgtgaccaatgccaagtcatacgaaatctgtatttcgtatcatggagaagatccgacccggctttgttttactccgggcgatgactcattccaaaccacttttgtggaacaatcggctgacgcatctccgaacctgctgggagttctcggaagcgagaacctgctgtacctgcctgccacacgccccggtggggcatatatgcatcccgttaatcccgattcggaaaacaagctggggcgtaacggggaatttgtgatagactattacgccaagcaccgtctggatacgctggatgccgcattgatcctggctcccggcactcaaaccctggaaggtcaggtgaattatcaactggacaggctgaccggttaccggctggtggtggaaacagtaggaagcaatcattacgtaaaatatgaaacgcgcagcggcaaacagcttctcccttaccatgtcggtaccggagtaagctttatgacggaagtcatcatagcttgtttcgcgaccccgaaaggcggcatggtgattacggagaatccagaaatccatctgcaccccaaggcacaagccgacctgattgatttcatggcaaagatagcgaaagccggtgtgcaaatcatcatagagagccatagcgaccacctgtttaacggtatccggcgcctgatcagtcaggaaaagttggccttgtctgacgttgccgtgtacaacttcagacaagacgggaatggattgacccatgccgaacctgtggaatttaccccacagggaggaatccaatcctatattcccggcatgtttgagcagtttgatattgatttggatgccattttaaagctataagactctatggacggtatcattatcaatgaattgtcattgaacggacagtttttggacagccgggatttctggaaaaacggaatgcctccgtttcacaaggcattgcaggatgccctttcacatggagtgggatatctgttcaaacaaggaagtttttttgctgcgcaagccactcccgacaagactttacacgatttgctgacagcaccggaaacccgtatcatcgatgaagccaggctgtataaaagtacattggcacgtgccatctgtaatccgttttgggatgaagctccccaacaggattccaatgcccaatattcagtaggtgaaaccgatgtatccggcagttcagttgccgaagcagcagcccgctcggtttgtcttctatcatttattagatccaggtatgagaagcatctggttgccgtaaccaaagatgaagaaccaatcgaggttggtaatatctggaaagagaagcaattgtactctatcttgtttgaaaggggtgaactatctctcgaaaagtatattaccattcgtttcagtggaggcaagcttgatttcagccttattgatgacacgctgggtttttcccttattgacggcgagaatcagaacgaatttattgattcattccataaatttgaggagttggactggagtgccattgctacagataatggattggattataaaccgtataacaagaacaagaaaagcaagcgctatttttcggatgacctatggaagaaaggcattaaaaagttcagaatcactcagcggaacaggtgtttcggctatgtggagaatggtgttttttatgtgttgaggtttgatttggaccatgagctaagcgatgttggataatgtttatagccccttggccttatttttataaaaatagaaagctgtgcaaatttataagattggcatcttgcttatctccatatactttcagtcggaaattcaagaattacaaatcctaatacttataaccggcggatttataatccgccgggacgggtcttgtaacttaacaataaaggtagtgttccaataattaatatgtaatacatttgttttgatactacctgctattgtactaaaaaattaagaatactcccaatatgcaacaaaaagattttcaatattttcattttctattttaccatatacatatatacttccactcataaattctgagatgcctctcattccaatttcgttgatttgaaaaatgaaatcatatccatcttttgttacttttccatcattatccaatccccattgtattggtatagcttttcctccaaatttgataacattatttttttctggcccatctctgtcttctcctatttcatataaggaataaatatcatcaatttcgggatgtttaaatttagtacaattactctgttcgcttatttcatgttcaattagtaatactttgcaattaggatatgaattgtattctaaggaagtatcaaaatctggagtaaaaatagagtattgtctttctttatttaatgggctttgcagggttaagtagaaataatatttttccatattagggaaagaaatattatctaatattttaggagcattacccccaacccaactattacagttttctttatattcacatatatcataatataaagcgtcttctctagtctttaatatcttttttatgttcataactattttatgatttacatgttattaaattatttgctttagcatgtgctattgcatcctgtctgagtttctcgactaatgcggttgctttttctttcgcagtttttctatccatgccatcagctattaacccttccattattcctctacgtgttaaagctgcatttttgtttatattttctagtgcagattgtcctttcaagtttttacctttcatcccatatctattttgaagagcggtaattctattgtgtatacccttttctcttaatgcaatagaagggttttctttagaaattaaatcaactcctctatttttacttgtgggaagtttattgttctgttcaagccatgcgtgttgaaggagttcgtgtgctgttaaattgtcaccaatattcgccctactgctaatattgccataagtatcgatgtcaaattctttggctacaagtccaaaaatatcaatacaaagattgacatttttgacatagctataaaatctttcacctgcacttagtccaatagggtcttgacttatataattaccaatttctggttcgtagtacctaaagcggttgtagcataatttagtttctttatccacatactgcccttgatagcggaaaggacaatcaaattctgttcccttatcaatggcaagcacttttccatagatatccagtgtacagtcccatgtcttgtttccttgttcgtcgtacatttggatgggggtacccaagtagtcggacacaatggaatattgtttaccttcttgtatcttagctgtaggaacaaaagttccttcttcaaatacccaagtggtaatgttttcaatcggctctttctgaaaggattctcctttttcatctggttgtatttctgtagttttgtatctccattcatgtataggcacgtttccatcccatatccaacgtgtgaccttcccgaagtattgctttgccgtgcggcgccccaacgcatcataccggaattccaccggccttccgtccggacgtatgaccttcttcagcatgccgttggaagcccattcgtaaagccatcccgttcccgttgccagaaaatggataccccgttccttctccatacgtttgcggtcgaaccttacacccgtttcctgcaaatgcttgaactctctgaaaatgaggttcccctcatcatcgtagtgatagaaacaatccgggtcttccaaaagttttcccccggcaccgtatttgcggtctttcttatccggtgtctcaaagaggttacccacgaagtccggcacacggtaaatcacatccgtttccgaaccttgggtggtttcctgccggataaggaagtcgaaacggtcatagtcgtagcgaatgaccgttcccgtcagctcgttttccttggagagcaggcggttggcgattccccattggtagcggtaagcccctttctctatgccgcctgaccgtaccgacttgcgtatctccctgccgaaacagtcgcgttccgtcttgacagtcacaccgccggagaaacttcgctgcacctccagcccggtattgtcacgtacccaggatgcctgccagctttcacctgcctgcatggtctgcaggttgccttcccggtcataggtatggcggatgtccgctcccagactgctggtgatgcgggtgcagttgccttcgctgtcataggtgcggctgacagtgtattctccctgcctttcctctgtaaccagtcccgtcttcctgtcacgggtgaactccagcaggttctcgctgttcttcgccttgacgagcatgccgtccttgtcatacgtgtagagggagacttccccgtcatactgttcctccttcaggatattgtccagtccatcatactggtattccgtccattttcctccgggacggttcacacgggtgacacgacccgccccgtcgcgctcgtactcacgccgcagaccgtcgaagccggtttccgcaacgacctgtcccagcccgtccagctcgaagaaatagttgtcgcccgcctcgttgccgatgcgccggagctgcaactcgctgttgtagccgaaggtgatgtggtgccgttcctgctcgcggcttttcagtacccccagtgccccataggtgaacctgacctcgcggatgttgtcgctggcatgtaccatgttccccatggcatcgtactcaaaccggtgcacgttgccgtccggctcttccagccgtatcaggttgtccgcacggtcgtaggcataacgggtaacattgcctttcacatccaccgcctgtacaagccttcccctgccgtcgtactcccaccggcggaacagtccgttggggaactgcatcagttccagatcgtacctgtcgttgaacgtgagcgtgtaaacccgtccctgcccgtccgttatggtgcgcagcacgcctccctcgtaggcatatttcacagtctctccgcccggtgtggtccggctgacgacccgatcctgtccgtcatagtcccatgaaagcctttttccacccggagtgtagagcgagacgaggttgcgattgccgtcgtagtccaggaaggtgtcctccccgttctcgtccgtaatccggaccggctggccgaactcgttgtaggcagtcttacgggtatagccttcgggattgaccgtgacctccaactcctgaaagctgttgtattggtgacgggtaattcctccgttggcatccactatcttgtagatgagtttgtcctcaccgtaataatattcggtttcggcattttccccgttacgaatatgggtatatcccttgccgtaacggatgaaatattccatcacgcctccatcgccccatgtatgcacacagcgggcattctcacccttaccctcgtattcccaatggaaggacatacccccttggttggtaagctgtaccagcaggtgtccgccggaatagacgaaatgtttgctgacatccagcgcgtcaatggtttccaccatgtcgccccggtcatcgtaacggtagcggaccagcttcacctcctcaccgtcctgatttacggaaacgcagagcacccgccccgactcgtcggtttccactttcaggaattctccccgtgaggatatgattcctgccagccttccccccgaagcgtattcgaagcggagccggaatccgtccttcgtggaaatgcccgataccatgcggtaaccggagcggttttcaggaccgtcaaaacggtattgcaacccccggatgtccgtaagcaggtaaccccggccatcgagtgtccaagacaactgttccttgcggtcaaaataggaatctccgggtttcagtacgggcaggaaagactcccgtccgtcagcatggcggaatgcgaacgccccttcctccagctgccgtattcccagattgtagctgtggtgccagttgtatcccaacggaccgtccacggcggcatcactgtaataggtacgttcccatacgacgggaatcggccccggaagctcaaagtccacattggtgtgatagaccctgcccgtagcagcgtccaccggctcgccgaaagtcttgcacttgatgggctggagaatgtccgccagcctgttcatgccttttttcctcagcctgtcgattaggttttggaagcggtcgcctatcttcttccacatcttgcccaagcctttcagtccgaacttcatcgccagcgcaaatacatcaatggtaggcggtcctcccacaagcacgggatttcctacggatgtgatggtggagagcatggaagtgggggcaagcagggccttgctcaccttcctgggcttccccttgcggggaatcgtcggtattcccacaatgttgcatgagagtgccggatgtgtgagggaggaacagggcgcaccgtccgccaggacagtggaactgcccatccacatctcggactcggacataccgctgaccaacggggccggatgcaatacaaatgccggcagatgcacgatgccgatacctgcctgcgcaatccactggttatgcaccttgaccgacggagccatgctcttgaggatgttgcacgccactccggccactccatcagccgcaggcggcatggcagccgccatgccggccatgaggtctgccatgaggtcgtacaccttgcctacatgaggcacaggcatgatgggagagggaggggtaacggtaggatgcatgtctatcccgatggacaggtcgccgaacttggcgacaggcatacccggcatggaaggaaggattccgcccagacccgcctgaatctcgtccaaagccgccttggaggctgaaaaaaggtcggcaaagccccgtctgacgctgctgctaccggcggcgtcagctatattcttgaacacatctgacatggtgagaattttttagaatgtgaaaaagagacaaccgggtgttccaaccggcacactccggctgtccctgtaaggacttacctatgcatcctgtgcatagtcgctgttccagtcgttctcgtcatccccttttgtaccttccaacttgatgacaaaactctttgccgggaaataaggagtcaggtgaatgtcgaggaaaatacggtctttctgcttcggatcgcgctcgaaacgaagaatcttgaatttctcaatcaagcgtccgggaccctgtatgctatccaaaaacttgctgatctgaccacgcaaatccctttccgccttgctgttccagttctcaaaggcacggcggttgaggaaatccatcagcactttcgttacccaatcgaacacacggactacggaataggtctgcaatcccaagttgtccccgttgaacaatgtcttggcagagaaagccatcaccttgccgtattccttcaccatcggaatcaggccaatcttctcgatttcggaaatctcgctttttttcaggttgaaagcaaccccgtccacctcgctcatggaaccatacttcttaccggcggtaacctgtgccattaccgtcttgtacacactgccggccaatgccgcagaaggaggaatcagcaagtcttcggtttcgcccagttccgcatagcgtccccgtcctaccagatagttgcaggtcatacatacgttggacttgtacacatcgcctcccgaaagattggaatcaaagaacatttcaatgacatcatccggtttttccagatcagcgaaatccgtgtaaatcatcaccttgttgtcatgcgcaatctttgcccatttttcaacaaccttgttggaacccaaatatcccgggataaccagcagggaatagttggtacgcaagtccaaacggtcataattcgcacgaagctcgttagcaatggcatcgataaagaaggagttgtccaaatcggtaagctggctcatcgaagcgttcacaatggagatattcttgatcttgtcggaatccgtattcttgtagaagagcatgaccgtgcggtaggacttctccaactgcctgacctcttccaccgctttcagctggttctgggatagcagaccggacaccgccgcagacttcttctggcacagttccaccatctcgctgatggatttgttgcctttcaacatatcgacccacatctcaagccgtttttccagttccttgcgctcagccgcccgttcggggtcggaaaggaatatgttccgccgtgccttgcgctccggattcatgttctgtatgccgtccacggaagattccaagacattgaaaccgccaaacttagccagaatctgcaattcagcgttcagatttctggactgcgccacagcctgttgctgctgtacggctgcttctctttgtgtattctgttcgctcataactatcattcattagtggggttagacttctcattgttcttcaaatcgtccaaaatggcagaaatcgcattgacaaacgctccacgtgtctccggattttccagcacccgttgcagcaccttgttggaacgcaacgacttctccatcctgtccgcaaactgcttttccgcattcaggccggacaagaatgaactctgttccgtcattttcctgacagaaaaatcaccgacattgtggaaacggaaattttcctctacgggagcaccgtccgcatccgcgaactcgatatctatttccggccggaaatgtgcaaagacttcgtcaatgttggtcagaccggcaaccacttcgggagccaccggctcatccttcgtcagctgttccaccaataaggttcgattttgtggaatttccgcaataccttcggaagcgtcaatcttcacttcgtttccgccgattccataattaccaagatccatacttattcaattttaaatttaaaatatatattaattaaatctcgctcaactgaaaaaacttccccttcttctggccttcgcctgctgcatatccggattgtccaccagttccttccaatcctccccaatccattcgcagagctgccgttccaatatcccgacatcaatcggagcacgaaccagccttcctgtatgaagagccagatacgccgcataaacgaacgtggaactccgcctgatttcggcagaaaggtagctgcctcctgccagggcaagcaaaaaatattcgaaagcctgttccatctttccatcctcatagcgcaggaaaccacacatgcgatagccttccatgacataataagggtccttttgcatgacggcttttttagccatcatgtcatacaaggcaaccgcttcctcccgttttttcccggctgtcagaatggccgctttcatggaaacagccattttccaataactatatcctgccgtttcaccgccctgcatcgccttttccgcctcccggacggtttcgtcgctgtatttcatgctatgcttatattccctgatagcataacatgcctcggatgcgataagcagagcggaaatccggatattcgtatcctttatttcctgtgcaatatccaacagttttcggatttctctgtccaataatttccaatcctgcttttgtgtagaatccatgacaaccgtaacctgctgcttgaaccgattttcaggtgcaatcaggtcgttaccgctatccgaccgtgccatccggttatgcaaagccgccgccatatcgaactgcgggcgtatgcaaaccacttcccgagactcacccagccggatactcctgttctttttcaagtcaatggttgtcatccggattccctgcgggacaccttctttcagcacattgccgaaccatcctgtccgggaataccccctttcctgttccggaggaaagtacagacagaaaaaggcatcatccaaccgggagatacatgccttgaaacgcaacatctctctccacaagttgcccgccgtatgctcaaccgacacatcaggaatgtattcttccttcagcagcccgtcgtgcctcagagccctgagaatatcatacttctcctcaaccttttctgaaaaccaacccgcatattcctgccagagctgttcagtgtattcctcgtcatcccccctgtacggcgtatcaaaacgaaagaatatgtcatcgaactgccctaccggagaacgttctatttccagaaacctgtccaccaagtccacatcattctgcccgacaatccatacagacagtttccagtccctgttgccgactatgtccgcccagtaatcgactgctttgtaatattcctgtatcacagatgcagatgctcccatagccaaccgaattatgagttaaactttactattcctcccgaaaccgttacgtttccctttccctctatcatcagatttacaccgttgaccgttccgttctttgcagcaacatcgtaatcctttgccgcctcctgtttgatattggtaccgctgctgctaattatactcttttcgctgctgagcaccatacattcgttgccggacagcaatgttacacttttcctgccttcgagagcaatggtatcggcctgcaagcctatcgacttatcatccattacgatgaccgattccgcctcgttggtaagggtaatgcttcttttcgccatgacggtaatggcatccgtgccatccaatatgatcagctgttttcccgtctggtcggtaataacgatgcttcccgtctcatcgtcgaaaacgatggcattgccgctgcgtgtgataatgctcttgaccttgttgtccttgtcccctcctttacctgaaccggaatggaacaccgatcccgtaacataggggcggtccgggttgccatgctcgtagcttaccataacctgatcgccgacttccggaacaaatacccatccgcgattcttggaaaccgcaccacttactcccgcattaggagtctgcaccctgatccaattggttgtcttgccgtttttctgccagtcgaaagccactttcacacgtccctgtcccttgtcgtcgttgttttccttcaccgtagccagttccggcaacgccaacggtcgcttcacatcgggaacaggaatatgtaccgtaccgtccggcacaccgacaaaactattggagtaatgtccgtcacggcgtacctcatgctcaatcccgacaatacggaacttgcctaaaggaggcagtttcatcctgtcagggaaagaaacatcgatgatttcaccaatccttatccggcaagtctttcctatgcctttgatgttcagaagattggcaccagacgcattctttacaatcctcatctgttcgtccagttccgccttgtccgttacatgggggtcggcagccgaggtcgtttttgcagtatatgccttctcagagcagctgtgtgcaatagactgaaggtcgttcatgccatccggtttggcaggcgtatccgcattatgctgtttgttctcctgcgctacataatcgtatcttgcggatttacccggtaccagattggcaaccagacgtacctcctccaaatccatgtcataaacaatcttctccgtattgtccctgtcaggcttgccgaaatacactttcgtcccgtcataatagaaccactccccataaagagccgaaaggcgattcataaagtcaaagacactctcgttatactgcgccatgtagggtatgggcgccgcatacttgggattggaaaccaaattgacctttccatactcctgcgtcacctcctttattatggtagagagggactgatccatccaagaatcgagtgtcctgttgttctcatacagtatcgtagggcttgttccgtgaatggccactccgcctgtctcgcccatgcttccaaccatttccacttgagtgatgattccctcgaagtcataactttcacccgtctgcctatggacaaatgaaatgctggctgtctccccgatgtagccgatgaatttttccggggtctgttggaacgtattgttaggcgacagataattcaccaccacagtgaaggtgtgatgccggttgaaaccctgacggagatgcagtgaaacgaatttctgttcttctcctttcacggttactttagtagccaccaaattcagaaaacttgctcccatactatcttaaactatgattttaaataaataatccgactggtcggtatgttttttggtgccgaaataaccggaattggtatattccggcaccttaaaactttgattaggaaacaaccattagttgttttccggccaatcctgtacaaatgtagcctcgtccatcttcacggtctgtgcagaaatggcgaacttgattgtcatcggataagggttagccacattcagtgcctcttcgtaatccaccacataaccattttcgaacaccaattccttcattttggcatcttcatccgctttcttgaagacgatgtttccgtttacgggctggtactgcttgaacatcttatccagcacaatggtatcgggagttgattcgatttccacatagattgtgccaccataaatgtcagatgccggacggcctttggggtccacatcacgattgaacttaactctccaggtcagtacatcaaactctcttgagtccgaaaacttaaatgacgctttaaatgccatattctcaaagttttaaattaaaaaataagttgattttgaaatatccggtcaaaggaggcctgctacagtcctatctttgtccttcaatttctgcgcccaacaatatatggcattttctgaaaactacaaagaacttttgatgattttttcttgtttttgccgaaaatatgcccataagcataaaaaaaacactgccaacaatagccgaattattttttttgccttatatttgcaatgttctcctgcgcaatttttaaatcttacgattatggaaacaggagttggtttcatcaatcttgatgattctgtaaaaattgcgcttaacatagcacttgcagtggctcgtgaaaatgcgaacgagtgttatacaccctcgcatttgttgaaggctctacttcataaagatgtagggttaagagattttataataagtataggcaaggatttaggctatctggaggaatgggcggacgtgtatatcgaacaatgcccgaaatccacccagttgtccgaaatcaagccttcggaacggattgacgccgttttccgtgccgcagacgatgcacgaatccagttcgggctgttcgacatcaatcccatctgtgtgctattggcactggcaaagcccggtgtcgctttttccagcgaccagctcaggtctttccccattctggaaaaggatatccattccatatatataggtaacgggcagccggcatgtccttctgccactacggagaagtcctatgccccgacttccgcctcatcctccttcttgggcaaatactgtgtggatctaaccgaagatgcggccaacaagctgcatccggtcatcaaccgcgaccgtgaaaaccgtatggtcatggagatactgggaagccggagcaagtccaatgtcctgattgtcggtgatgccggagtaggaaagacagcactggtttacggacttgcctgggagatagtcagccataaagtgccctcgtttctggaagaaacccgtgtatttgaactggacaacgcctccctgattgcgggagccacctacaagggggaaatcgaggaccgcctgaaaaacatcctgaaagaattgcggaatatcgacaatgcaatcctgtttattgacgaaatccatgtattgctggacaaccgacaaggaaataccggtgcgggaaatgtattgaaatccgaactgtcgcacggcgacctgaccgtcatcggcgccaccaccattgacgaataccgcaaaatcatcgagccggaccatgctttcagccgccgtttcgaggtcatacaggtaagcgaaccggacataaagtccgctatccagatgctacactccgtgcagaaacaatacgtggactaccatcatgtaagaatcagcaacgaagccgtagccgaatgtgtccgtcttgccaaacggtatatcaaagaccgccgtctgcctgattccgccatcggtctgctggacatgacgctctccgccatcaagatggtcaatgaaacaggaaagaagaatgtggagaccctgctatccgggctggatgaaatagaaaaggacgaaaaggaccttcaggaaaagaccgaagaactgaaaacgctgcttttcgtaatgcacaacaaattaagccccatccttttaggagtcatacccgatgaagcggatatccatgaattgcaggagtatgaagaactgaccggctatctgagaaacgcattgaacgtcctcctccaatttgcagagaagaaaatagaggaggtgggtatctatgaggtagccgccgttgtcgccagcaagacaggcatccctatcggcaagatacagtcgcaggaaaaggaacggctactcaatatggaagattatctgaggcgacgcgtcgtcggacaggaccaggccctgaagacattgacggatgccatcctggaatcccgtagcggcatgaacaagccgggacagcccatcggctccttcttcctgctgggacccaccggtaccggcaagaccgaacttgccaaagcactggcggaagccctgttcaatgacgagaaatccatgatccgtttcgacatgtccgagttcaaggaagaacactccgccgccctgctgtacggagcgcctccgggatatgtgggatatgaggaaggcggcatgctggtcaataaaatacggcaacagccatacgccgttgtcctttttgatgaaatagagaaagcgcacccgtccgtatatgacattttcctgcaaatcatggacgagggaaaactgcatgaccgtctgggcaaggaaggggatttctccaactccatcgtgctgttcacatccaatgtaggaagcgagtggctgaccaagcaacttgagtccggcaatgttccgtccaccacccagatcatggaggtgatggggcagtatttccgtccggagtttctggcacgcctgtctgaaatcgttccgttctcccccatccgcgaagacatactcctgaaaatattcgacatacagttcaacggagtcagaaaacttctggacaagcagggtatcggcataaccatcaccgatgatgcccgtaagatgcttgcacacaaaggattcacacccaaatacggtgcccgccaagtggccggtgtaatccgtaactatctgcgcagaccgatttcacggcttatcatcaacgaggagctgggcaaaggaaaaagtctggaggtaggtctggacgaacagaatgaattaacctggaatattcaccaataatcaagtacactatgtttggatataccgtattcttaaagataggcaacctggctgcctcctcactgaccgacatgtacaaggacagctaccagctcatcggttgcgaattcggatttgcccaagggatagatatcaaaggacaggcacagaccgaggtaaaaggcggcacgttttatgtaacctaccctcatcttcccaaccgtgacatgatccagtggatgctggatgcccgtaaataccagagcggagccatcgtagtccatgacaaccaaggctccacactcgaaaagatactctttgagaaagcgacctgtgtggatatggaaatcagctatatccggcagggcaaaagctatattgcgaccaaactgaccgtacaggcacagaaactggcattcggtacagaagagtttgaaaatcagtgggtgttttaaaaacagcagcgttatgggactttttaattttccgcaagtggacagcaacgtgaatgtcatattcagcgttgacggcgacgaatatgcagtggaacagttcaaaataggttttcaccagccagtagataacctaaagaaccaaccggaaggcgaagtgcgtggaggacgaatcatgataaccctttcgcagacggtgaaaagcaacatctacggatgggctgtgaaaccgtgggtgaaaaagaacggggcagttctgttcaagactggaacgtccggaatcgtgtttgaggtggcgtttacgaatgcatattgtgtcaatctgagacgggttatagaggctttgggacaaggattgtcaacaagtctgattctatctccagagagtgtaagcgtgaatggtattgaatttgataatcggtgggtaaagtaatgggcgatattctgaataatagaataataactctagaggattttgagtttctaaaatcaataggagttccatatacaggttatgtcaagggtattggatatacctgtcctgtgtatatgccagcacaggctttcaggattacagatggtaatgtgcaatggagcagttgtgagttacaccctcttttttatcaagctatagatgatagtccagagcgcatctttttgagcatgggatacactactgaagatataattgaaagaataacttatgataatggtaatggaaccataactgttgctgtgggaaaccggtctgtaacttttccaaaagaacaaggtaaggttaatgtgtatttgaatcaggaaggtggtaattattttatttatatagaagctacagattcaaaaggaaatattcttttgagtgattcaaaaacgattcgttcttatatacatgagaaaggaattaaacaagattttgacattacagatggagtgggctttaataaggaaattcttgataatattaatacaggaattggagcttttggtattgggttaggtgcgaaaactgaaataatagattatggaataagaagttttcatggttattcttggaagcagtttaattcactcgataaaaagcagcagttacttaaagaggctcaagcaattggaaaaaccgggactaaatatttaaaaggtatgaaaatgcttggaaactggagttcgtatgcttctgctggttattctgtttccttaatatttgtagaagatggaagaacattggaaaagaaatttgttaaagcagcattagatgtgggatttacctatataggtatattgggaccatggggatttgctattagttctatttactatttggtggatacagctacagatggctttggatattttaatgaataaagttatgcataaaatcttagaatatttgttttataaaattcaagtattgactcgatatatggacacaagtatgtatttaaatatacatgttccatttattatgtctacagtcttattattctatttggcagatattgcaattatatactattatattataatgggatattcaccacaaaaaaatccaagtaatgtgtttttggtggttttcattattatgattttattatggagtagtctctatttttattatcggtataaacatagaaatgaacgaattatggaaagaaaaatttatgaacatagttctaatgtatgggcatatcttttcatatttactccttttattgtattattaggatttgctttattttttagggtgtccagttctacgctctcgtttttggtattgatttaacaacttaagatattgattattaactataacactattgtttttaggtacaattttaacatacaaaaaagcatagctaattcattgaatcaatatattttaaagagatatgattatcagcactttggaacttgcatcatatcttttttgaactaaaagctggaacatcaaactggacaccctatttatttttttaatttcattgtttatgaaagagtataaggtattaataatttatacaatctccaatgatcaatcaaaaaagtcatttgaagaagaactggagagatacggtctggaacgggtcgggacgcaagatatctttgcccttcccttagaggaataccggacaaaggtacaggcattcaaagcctacctgcgagcctatgtacgcaagcatctggacagccaagacacggtactgttcgttgaatcacgcatgaacgaggaacggaccctgaccgccatgctgcaaaccaatctgatgagtgaagaagaataaaataacataaggatatgagtgcacaatcgtatatcaagttctggacagccgaaccctcggagcatgaagaagtgcaggcatacgacctgctgggctacgagtatgacttccggaaagaaaccactcctaacggaaaggtaaccgggaagacctacggcggtaaaatacgggtaagcattgccggatttcctacagaggaactcttggaatggatgttcaattcaagaatcctgaaggacggagaggtgatgaacacttccggcctgcccggtactcccaaagagatcatccgtttcaagggagcaaaatgccttgatttcaatgtgcattcaacaaccaaagagagccgtacctcactattcatccacttccgggaaatggagaccggcgattcgtgtcacttaaacttataatcatgaactggttcacttcattgttcagaaacaaaaaatcctcaatgccggatgaccgctacgtgatgcggctgtccgtctgccatgagacatacagcattgaagagttcgacctgcaattcaagcggaatacagaccgtgacggattgcctgaaggtgaggcatacggcggattcgtcacctgtaccctcagcgggatgccgggtgacgagctgttgagatgggccgcatacagccactcccatgaagacggcgaaatacggatctacctgaaggagcaacccgaccaacaagcggcatttgccttgcgctttgtggaagggaactgcatccgtctgcaacgcaaggttgaccgtatctccaattccagcagcatcgtccttctgtttgccgcaagaacactaaaattcatagacgaagaatttgaaaacgaatggcactgacaagtatggaaacaaagttttgcaaattgcccctggattttgaagccttgctcagcgaggatgtggaaaacagccgtcttgcatcctgctcggaaatcgagtccatcgaccagtttatcgaactgctgatcagtacggctcccggcgaacatgcctttgacaaggagttcggctgtgagatcttttttctcgactttgaaagcattgtctcacacacccgttgggaaggacaattctcggaatacataaccaaggcaattacccggcacgagaagcggcttacgggtgtaaatgtacgtgtcatcattgatgacaccacccgacaggacaatgtatttgatgctcccgccgtaaagaaacgtgtacaagtatatgtatatggaaccctggtacataccggagaaaaacggtgtttctattatgtaatctatttaggaccgatttcaacccgatgaaaggattatgagtacagaaaaatacaataaagagcaaatcagaaaccgtatgctgaaatacgctgcggctttctggggaataaaaaaggcggaaaacttcgacccggttgtcaagctcctgctggaagcattgtccaacgagatatatatgctgggagaggattttaccgccatcgagacaaggctgctggaaaagaccgcccgaatccttaccccggacatccttacctcaccctttcccgcacacggcatcgtacacgcctatcccatagaaccgtgttacctgataacccgggaatcgggcatgtattacgagagcgactcgcttacccggaagctatcgaccggaagcgtatcgttttatcccgcctgcgataccctgctgcacaaagccgacgtgaaatatatggtctgcgacgaccttctctaccggatagcccctaccttggagaagaccatgattgcccgtgcagagacaaggatgtctccgcgtaccgtctggttaggaatggcggtggatgaatccatttccgaccttgaagacttttcgttctatctagattttcccaaccttacggagagctatgaatatctgctcctgctcccctgtacggaatggtccgtagaagggaagacagtcgtgatggaagggggaatccatgaaaagacaaccatacagaaagaaccaacccgtgcctttttccaagactatgacgtaatgtccgtcatagacaaggaagtcatggatatttacagcaaacattttctgaaggtatcgcagtcctttccactcgacggttcctgcaggaaaaaccttccggacaccctgcggtcctgtttcaaagaggccgttctggagaagatgcaggacaagctggtatgggtgaagatacagttccccgcccatttcacaacggaagtccttgaagaacttcatgccggcatcaacatcgtgcctgtagagaacaagacgcttcacgaacagacgaccacccttgaggaaactttcagggtgatacccttgcgcacgggcagctacgaatcccttctgtccgtacacagcgtgaaggattctgacggaaagaactaccatgaactcctctattccgcaaaggattccacggaaagctatggaacctactccatccgcaaaggaggatgcgagcgtttcgactcccgttccgccaaggagctgctcggctatctgtccgacctgctggatgacgagacccatgccttcaatgccgtatcaagcatcaagctacaggcacttaccatccagatggagcagctgatggcgcaaatgaaacagacagcggacaacatgaacgagttcagggaaacaccttattaccttatgattgacgaattgtccggcaaggggcagattaccgtcaaatactggacaaccaactgtgaggtaggaaaccggatacaggcaggcgtaaacctgtcccccaatgccaccacttacctggacccgaagacactggctctggtcagtaccacctacggcgggaaacaagccccccaaaacagagaacggattgacatctacaaatacgccttcatttcgcacggccgtgtcctgacacagaacgacatagccagcttctgcaaaaaagaactcggagaactgctggtgcggacagaaatccggaacggggtggaaatcagcccgatgccgcacgaaggactgatccgaaccaaagaagtccatctgattcttggaacgaaactggatgagccttcgcaggaaaaacagataaaagacaatctgcgtaccaaactctcggcctgttcgccggacacattcaactaccggatattcatagaatacaataaagcataaataccatacttatgaacccagttacccaacatctcatttcatcgtacctgctgatgccgctgctgaccgtgattttcggaatcgcggcctattttatcgcacgcaagaacaaactgctcaacaacaaaaaactgattgcgtatctgctgctgtgcggcataatccttgccctgcccggcctgtccggattcatggactataacttcatgccttatgcctacatcctgctggtcatcctgtactggactgccggatattacaaccggctcatccttcgcaaagtgttcgcgtcaagcaaggaaatgccttctttcggcatccaatgcctgctgacggttacggtcatgcttctgggagccggactcttttccgtagtgttcaacctctgcaacgaactccagtacggcatctgggcctccacctgcctgctgccctttgcatttccactcctgtattcccaaacggtgaacagctatttcgacatacccattgaaatttataaagtatggaaatattcggaggaatatgactcggataccttgtacatcaaccgtgaacggagcatcgtaatggatgtggacatattccgcagggtggatgaccccgcatcggaacgcataaccggcaaggcatccgaggatgtcatcttcgggcagtggttccagcgcatgattgacgactgcaacctcaaatcaccgtcttcgcccatcgtatataagaatgaaggaggagcctattacgaatgggtattctataccaaaccgtcctttttcaagagacggcgctatatagaccccgacgttacacttgccggcaacaagctgaaaagacacgatgtaatcatagccaagcgtgtggcaaacgaacttataaagtataacgaatattaaatagaaacattatgataggaaaacagagccaaaagaaaaaatatccgctggtaaactgggcggacggaatgcccgtcaacaaagggcatttcacccaacaggaagaccactttacggaccggttgtgcgaataccagtcgtttcatctgaaccgcaatacctacggactcctgccattcaagaaaggagaaccggtttccggcgatttcagcattacggaactcgttacaggcaccttggaagtccgattgaaacgttgccacgcccttacttccggaggttacctgatagattatgatgccggtgaggatgacgaactcaccgccagtttccatatccctacagaagaggaagaagaaaaggacaagcggtgggatgtcatactgatggcagaccctttcgagcatcttccttcgggtattccgaacgagaaggaaatcagtccacgccagcccaatgccttacccaaatatgcgttgagcgtgctgccgagcggacagaccgacggaagcgagctgggaagacactttctgctgatcggccgcctgcgcaagaacggaaaccgctgtgaagtggacggaaacttcatcccgccatgcacaagcatgtccagccatccggacctgaaaggctactataccaaattcgggcaactcgtggattccatagaaaaagcttcgtttgacatccttgccaaagtggagaatgcagaaaaacagaccagcctggccaccaacatcggtatgctgtgccgccatgtcatgctgttcatatccgatatctacttctccttccgcaacgaggggcaatactattcaccgctacacttcctgaatgtattctccacattggctcaccgcctgtatgtatgcctgagtttcatggacaaggaagacaaggaggacctgctgaaatacttcaacgaatggaacggcatcactcccggtgcctacgaaggcctgctgagggaaaattgcgggctgctgtacaaccaccacaatatccgccaactgatggttacggcggaacgtttcctatacctgttcaatgacctgtggacaaccctcagccgtctggaatacatcggcaagcacaaggaaaacatcgttgtcgccgaacgctccagacaaccgaaagaatcgagcgagtcacgctggaacatactggactaatcccctataagcgaacggacatgacggaagaacaagataaaatagtacggtttgacgaacattcccattcattcaacctgccggataccgacttcaaggcggaagtggtggccagcggactgaaagaggccgggtatgatgcagagcgtaccctcatattcagacggggagacatccggcgcggattctcgaaagacatccatgacatccacccggaatattcccattatgacctgacggattacctgtatctttatgtgaacaggagaagcctttatgacgagctgcccgaaggcatattccacaagaacctttaccagtccgagaaaatatcgaaggaacaggtgctggacgaaatccgcatccaccgcgaagaggaatttttcgcccgccgtttcttcaagcctttcgaaatctccctggaccatatgctggtagccttccagaataaggaacgccgcattgacgagatgaacgtacatccggatttcgtaagcatcttttccggtcaatggcccgtactggaactgctgccgacccatctggcggtcatgcttatccatatgctggcctatatggaacagattacagcgagcctctccaaagccggcgagtgcatgaccattctgaccggtgtgcccgtgcatatcaagagaggagacaaatgcgtggtggaagtggattcctgccttattcccaaattgggaagctgcattctgggagacgacatggttctgggaaacagttttgccgacggcacctaccagatgctggtagaaatcggtccactgtccgcccgacggatggagagcttctttcccggcgctgccgacagtaaaatactgaatgcgctgacagaactgttccttccctcggacaaggagatacagatccgctacatcatccagcaggaagatgcccggttcaggctgggaaccccaaccgaacaaggcgcctatctgggtatcagcacctatttatgaatataaaacatcatcctatatgaaaccgaaaaacaacacagaagtaaggaaagcctatctgagattcgcgggctatctgacatgctgcaccatccttgcggtaagcatctttgcctgtttcctgaaaacctccggcatagaagtaaagcgaatcacggagcaggcactggaatatgaccatatctatgccaaagagctgtccctgtcgaacagcatggactccatctaccagtacatgaaactgatgaacacttcaccgcaaataaacgacaagctcctgcaaagcgttgtcagtacgcgcaagatgaacctgctcaaatatgtccaaggcatggacaccaaagattgcaggctttacaggcagctgctggaaaacctcaacatcttcctcggggtaaaagactccatccgtctgctgaatatccaggaagagatggtgaagaaagacctgatgcagtgcatccaagacaactggaaaacaaggcgtaacctgaatgtgggttccggcggcaacaaacaataaaacggaaagccatggacaacaacagaaagacaatgaacaaacgggaaatattcatgggacatgcctatgtattcctgttctttttcctgacaaccgtagcgtgttgtctggtaatcttcatgtggaactcagatttcaagatgtttgaacagaaagagttcgtaaagatcaagatgaaccgcatcaaggatttccagcaggaacaagcggaaagccagttgccggtggactccctgttccgtaaaatagaaacatttgaaccgggcgtttacgcccagtatgaagaagacgacatccattatctgataaacaacctgcggaacacatacgaaaggaacagctgggacaagcgatacaagctgttcatgcacattgccgacttttatgccatgtggctgtccgacaggaaacagctatggagtatcggacaaaacataagtctgttcaaagccaatctggaggagtgcgagataggcttgcagaaaaaggaggaagacttgcgctcaggaactaaaaacaaatgacatgggaaaaatttataccagaaagattctgttcgtaatcgcagccatgctgctgtgcatccttgtcgccatactgatccggctgttcttttccagccgcaccgtgcgtatgacactgacccccatagaggtggaaaccggagaaacggtccattatgcagacagcacccgcaacgcacgctcctggctttgggaattcggcaacggggacatatcacacgaacggagcggagaatacgtgttcaagaaaccgggacgctaccaagtgcgccttcaagtggacggaggactggaaaggaaacagatcatcacagtacacaggagccgggatgattacggaagcgacgagcttgtcaggatgaaagcaccggcaaccgcctttcaaggagaaatcgtatctttcaaaggatacggtccgtcgaaagaatggcgctggcagttcggagaatccggaattgtcgattcgcgggagcagaatccactctacgcctatacagaacccggcatatacgaggttctgctgactacggagaatacccaatatccggtccggcacaccattgaaatccttccccaatatacggagaacgactcgacagacgtgcttgtcatcatcggcaatgacatccgtgaacacttgcaagccatcgtggacggcaagccgttcaatacccattacaattatatcctgaagaaatacctttgcggaaatccggacatagcggtaaccgtcaacaacagcaagaagaatgatttctattcctattgccaaggactgaaaatcatagcacgcaggaaaacccttatagacgaggtgttcgtcgatatgggagacaacctgagcaacgaatgtgtgatgcagctgatggtaacacagcacgaacgcttttccgaacaaaaaaacaaatgaggcatgaaaaagaattgcatatcgacactcataaaaggaggatggatttgcgggtgcatcatctgtatggcatcctgcggaccggtacaccgttttatgcggataaagaatgtaccccgtgaatatatgcgaaactattccatagaaggggtaaaggctccccgcagccagacactgcccaagcataccccgtggattgtctttgccaatgaagcaggaacatcctatctgagtccgagcggaaagaacgagatgcagtctgtgaaatacatggacgcatttctcgtcatcaagcgaaaaggagactggctcagagtcattcaatacgacccagccattctgaaaaacgggaaactgaaagaatggaaacaggcaaaatactgcggatggatcaaccaaaacgacctgttgctgacccggagcggctttaccgacattgttaccggattcaaaaacaaacaggtggtcatgctgaacgacagcgtggcattggccaccccaaaaacgtattttgccaacgactccgtaaaactgttcaaaaatacagacctgacacaagaggctggcaagattccattttacagtgtcgtatatccttatcaaatatcggaagacaaaggatgcaccctcgtggcagacaagccgcagcttgacgcagacagcatagggcatgctgtcatcggatggatagacgaacgcctgctgaccgcccccgaacagcagctccatatagacataacctcgctgccggacagcacgcttgtttttaaagacagggaacggaaagacaccttgccgctatcatccaacgacctgaagcggaaactgcaactttcggccagccagcctgctatccgctacagcccggtactgtcctaccggaacaatgacacgagcttctgcttcaaaacccggcttccgatgccggtcatcgacaaacgggaaagctatgtgctgaatgtcaacggcaatccaatctattacgggactttcaaaaacaagatagagaaggacctgcaaaaaataaacctcatgtttgtcctggaaggaaaagagaacaccatccaacggtttccagccgtggtgaatgccatccaaggactgcaatcgcaactggtgaatgacgacagcttttctttcaggttcggtgccgtgcttaccttcaacgaaccggacagccggaaagaccccatctgcaaactgactcccgactacatggagctgcttgatttcctttccgccaaagcacgtaatgccgagcaactgaaacctacatacggacgattcggcagctggtccggccttcggatcggagtggagcaattcaacaaatgtccagatgaaaccaatatcctggttgtcatcggcgataaagggttcaacagcgagtgggcagactccaccttggtgaacaagctggtaaaaaacaactgccgcatgatcggcttccagctctacggaggagaaccggataacttcaacaacttcgtgctgcaaatcgggaacatgatagattgctcggcaccacgcatcagccggaaaaaacgggaactgattgtatatcccgaacaaatcagaaatgaaaacgaatatgcggaggtgaaccataacacctattgtctggactttccaaatcggagcatgacacagggatggctggtgtttccgcaaaagaacgaatcgctggaactggaaggactgaccaccgccgtggattccatgctgatacaagtgaagtttgacaataccctgctgagcaacagtctggcaagggcattcgacgaagtgggtacacaccgatataggacagattcgacaatgacagcttattaccatatccgccagtcgggggtacaccccatgctatccgtacttccggataccgaacctgcctggagcctgcctgcacagccaatcgtactgccggactcgctgtcctccacactggactattatctgcttgtcaacgaagaggagttcaaacggttgagaaagtatgtggaagcaccctccaagctgatcgttgactataaatacgaagcggtcaaaaagaaaaagcaagcgaaggtggatatctgcgactgtccggacgactacctacaggcagatgccgaagaatctaccgtacgtgtaaagacggacagcctgaacgcaccggaatatgcctcaacccgccgtgcaaggagaaaactggtcagacatttcctttcagagcgcaacagggacagatattgcaaggtagggagaaagactttcctgagaatgcccctatcagaggtcttgcaaaggtttacctcctgcccgaccgactatcctttctttgaagtttaccgtgtcaaggacttgcggaaaaagaaaatgattacggatgcggagctggacatgctgattgaatatttcaaggaaaagaaaaaactgctggacgaagccgccggcaagccgttccagtccaacgggcagacatactattggatcagccgtgacctattaccatagtcattcacctgaaactgtattatcatgatttatgaaactattctgaaaataagaggaatggaggtgccgatactctattataactatcggtgccacatccggcactatgatgacccgaatctgagaaaaatcatacaactccacatccaagtatgcgaggaaatcggcaatcgggagtgtctgccggtcgagggagacctgattacgcttgcgtttgagtgcaagggtgaagaacagttcttctatgactggctgaacgaaggagccatgcacaacggggaaatccatttcatctacaacgaagtggagattgcggacattttccggttctgggactgcttctgtgtgaaaatagaagagtatatgagtgtaggaaactctccgatgatgatggtgctgtatttgtcaccggggattatcaaaaggaataatctggaggttagggagaaggtgtggaaggtgtcggatgtttcaattatatatcaaacttctaccgagaggaaagatgattcggttagcaatgattcaaataagaaaagtctttctgtaatttttgtaaaacctccatttcaattaaagaagaaatttcaaaaagatccattttatgaaattgaaatgaggaagcaattgcaaatgcagcaggatggaataaataatatgactatatttgagtggctgaaaaatagggagaattttaaaaaatatgggcgtaatcctaaatctaagaaaattcaagaagattttagggatagatataggaatgctaaaattgatgagtatcttttattgtatgaagatatggatattaaggctatagaggcaatggttgactcagaattggaaggcttagcagcattacataatcctgatcagatagcaggaggatatgttgatgtggtgactcaaatgggaaataaaagaataaattcgtccattgggtcacaatggggaagtatagaaaaaggtcgttctcttaatattgaaaatgaattgttaaaattaataacagaccctcctcctataacagaagaggagcagaaaaaaataaagatgaatgtaaatttagttgaaaacttagaaattgttaagtagtatgtttgagaaatttttagaaagaagtggaaattctataaaattggaagagtttagtgaggattatatccgacaatacaataatttggtttcggaaaaactaatttctttttggagaatagctggtattggcatttattgtaatggcttgtttagaactattataccgaatgactatcagtatattatagaggaatgttatcctatgtatgattatgaaacagtgactccatttatgataactgtttttggagatatttttgcttatgttaagaatcatgtaattggagattacgtcgtttttattaatataaggtatggaacttttaaaattctatcagaaaatattgacatattgttaaatatagtaattttcaataagagttgtcttgaaaattggtttttattgaatgaatataatacaataaaggaagtgaaggcgatgcctaagatagatgaatgttatggctatgttcctgctttagttgcaggtggaaaggattgtattgataatattcaaatagtaaagattgctccttatattgatacggttattcaattaatgggcgatttaaaaagaattagataatatcaaatcaacacatatgttacagaatgtttttaaggttgatacaatagtttatgtttcaattaatttaaattatgattatagtatatcttatatggaaaatatagcccggaacttcacgaagaagtatccaagctatcttatccataagaaaagcgaagacaagataaaagcctttctgaccgacagggtgaagaccaaagtggaaacctttgtgaatgcagaggcaaagaacgtggcagtaaccgaggtgcgagaaatagcagacctgatagcggaatatgaaggtgcagaaagttcttcatcttttggaccccatcctacggattccccctctttaggaaacaccggagtggagcttgccatgagtgtagacacaggcgcatcggacatccgtcctgtcaatgtagccaaacccacgggggcaacaggaaaacccaagataatgaaaagaagtgtcatccgtgtaaccatggaactggaagtgcagatggaaaccaaacaatacttgcaattcctgcaacagattccagacctgttcagcctgcatgaattccccaatttgagatgccgcgtgatatgcaaccagaaaaaggcaacaatcaacgaagagccagcaccggttgaagtgaaggttttggatgacagaaaataccagcggtggtttgttgcctttacactgttgatggtatgctgcatgggcggaatcatagccctgttcttttccattccgaacctgtacaaacaggacatccacttcctgcggaacgatacgattcatcaggagttttccatttccaacagccgtattgacttgaaggatgtaagcctgacgaatcatggcgggaaagacacacttgtcatcaaggataaaaagataatcatagccaaataaaaagcaatggaaaattcgattcagatacaagggataagaaacatgctatcccatagcggatgcccggaagacctgctggaaagttacctgcaattcctacaaaccgaaggccaacaggtgcagattgtcagaggagaagtctttatgatgtttgaaaaggaagcgcaataccgcaagagaaggaatgaaaagatgaaaggaaccgtaactttctgcaaaaacacgaagaacgatacaggggaatacaatacaggagtgttcatcggaatggaatttatccaatgctgcttcaaccatgggattcctgcacgggtgctgaatgtgcggagagtacatggggaagtgacggagattgtcgtggagttcgggaagtagatgaaaggaatacccctattgcagagctccgacctaataatatgtgggggaaattgatgggaaaatccccccacacacttcatcttgatatttaatgagaggaaggattactccttcttggatgttttttcattatccagccccaatcgcttgcataactccggatcgtttttgatacggcccatctcttcgttgatgatggcctgcgcgtccgacttgatctggtcgtagttacgctgaatctgctgcatcatgatgtcattaccgtccttgtccttgaattcgttgatgaaagggattttcctgtaggccttttcttccgcactgaccgccgcatggtctacaacaatttcggcatggaatattttctgttctatcttctcgccaaaattatccgccacagccccgacaaacgtaccttgcgacagattggcaatcttggatgccgggataagcgagtcaagctgcgtgttgatggaagtggaaacatcctgacggttgatggaaacggactgacgctgctggagcaccttgccgaagcgttcagaaagtgtctttgcggtttctccgaccacctgcccgctgaatatatttcctaccgtgttctgaataaccttggactccttttcaccataatcgcgggtcagctggctgaaatcctgaaaacccaaaagtacgcccaccttgttgcttcgtgccgttgcaatcagattgtcaagcccccggaaataaatggtgggaagctcatcgatgattacggcacatttgagctgtcttttcttgttgataagtttgacaatacgggaattatatagtccgagtgcagccgaatagatgttctgcctgtccggattgttgccgacacaaagtaatttgggttctttcggattgttgatatccaacgaaaaatcatttcctgtcatcacccagtatagttgtggggaaatcatacgcgtaagggggatttttgccgaagcaatctggccctggagctgatcctgcgcccctcctttccatgcatccatgaaaggagaaaggtagttttccaactccggataggaagtcaggacggtgaacaggtccgaataaggcttgttcagtaattccaccgcatgcgggaacgtacaataaatcccgttcttgtaaatcttcaaataccagattattgcagcaagcagaatgatgggggattctacaaaaaagtcaccctgcttttcaatccaggtgcgattgaggttgagcattatcgtatagctcgcctcgtacgcatcggaaatgtccgtcataaattccggattgataggattgcatcggtgagacctgcgcggatcgtcgaaatttatgacatagaaccggggcttgacctcgtacttgtccatattcttcaacaaagaattataggctatggtggacaggtcatcaaacttgtaatcgtagatgtaaatcgcaaagcccttggctataagctggcgtatgtaactgttgactatcgcataggacttgccgctacctggtgtcccgataaccatgcaggcacggaaaatattgacaatattgacaaatccgttattccagcgttttttataatagaatctcgttgggagatttaccgaatactcattctccatcagtcgggtttcctgcatgaaactctcattttccatattgaacacatcttccatgaggttgtgcctgtaaaggcggctcatccatagccccgacatcagcagggcgagatagcctgccgtaagagtaaaaatatagaatgcggtatttgccgcgtgcggcaatggcagctcaagcaaccaccagtttagaaagaacagtgcgcatcctgccaccagcgccgcataaattttaggccaggttatcttttcacctttgactccgtgcgtacccagacaggaaacggccagcagaagcactgccaacagtttgctccagagaatgcagttgaaaatcccggtcgtattattgaaattcaccagaatcctgtccatcaccgcaaggttcaagtgccacgtggtgatactcggataacaatacacatagacgtgtaccaccaaaagaaaaatactcacggccctgccaaattccatgatcttggcaagcgccctcaaatcgtcttcctgctgcataagaattgtatataaatgggttgatacttgttttgtctaaatgccacgtttgcgtccggtcttcttctttttcttcatgcggcgtgcaaaggcttcctcctcatagtcacgcgggttggtttccatcgaaagtatgcccgccgccagttcgagcgtgctgccggattcgtggcggtgatgctgccgaagttctgtagcggaatgtccgccccgttccttttcgggtatgttttccaaccatttgaaatagtcgttgaacacattggcggaaaactccttgcccatgcgtgaaccgttgaacacttcccgtcggtcgtggtcaatgaaggtgacaccgtagatacgtccccgctcattctcacggaacaccacatcgatatttttttgccccagcagttccacaaaccgtttccgtgaatccgcctgccgcaaggcacgggcgatgtccgcctgtatggagggtgcccattttccctctttgagagctttcagattcatcaacatccgcttttccaacagttcattcccgaagcgttttccgaaacgtgaactcttgaacggcggactgaccaccttgccggtatcatccgtggcagaatagacaatgccggtgtagggtatgccggtgtactcccccctgacctgtttcgcctcgatgttgagtgtggaaagcagtgcgctgtattccccgaaagtctggaaacggtagctttccagtacggctttaagggtgttgcctacctgatggcggacatcccccaaggaagcatccaccttttttagttccgctttcggattccgcctttccgtgtccgctccgttgcgcaagccgaaatccgtttccagttcccgacaggcggtcatggaacggcggtgctcgtaggcgtcactgatcttttttccctgtccgtctacacagacactgacgatatgaatgtgggcattatgggtatcggcatgtttgtaggctatgtacggctgattcccatagcccattttctgcatataccgttccgccaactctaccaattgcccatcagtcagctggtcttccggtgccggagaaagggagatatgcaggacgggcttctccgtattgcggtttgccagcaggtagttctcaaaagagagcaatgccagacgtatgtcctcactgggcaatcccaatctgtcggaaatcatgcggttgcccgaaagaatctcggcggtacctgccgttaccttgtcgtagttataggcaagtgctccgtaaaggcttgttccgtgacttatttttgcaaccatttccgctcgtattcctgggttagcaccatgacttttttacatacaagcatcagttcgatgctcagtttctccaacctgtagagcaatgccatcgcacgtttttccccgaaattgttcttcaaggtccggacaacctgattgtagttgtttccgacggcctgaaactgcctgtggaattcggtcagtttgatgtagtagtccattgtcgccttgtcgattttcacaactttaatctgtcccgaaaagatggatttcttgatgaacagcgtgcggtccccggctcccgaatccgccagcaatttttcaaatcttgtgttctcctcggcgttcaggcggaagctgtacttgcggtccgccggatcactcttgggctttctgcccgtccttgtccctgttgttttctccatgcacatgagatttttggtttgtacttttttctcttccggaatccgcgactttggagcggattcccccggcttttagccgggctagttgtttttgtcggacaaaagactttttgtcggacgaaaacacaacttgctctgttcgcttgaacagagaaccctccttcgtcggattgctgcgcgacgttcacggaacgctgtgatccgacgaagtcagttcttttccatcgtctgattccgattttgcaaaattagacagtgataaccgattggtaaacagcgtttgatatgacatttgatgacatctgatgacatctgatgtcaggtaggggaaatgttggtggaagtttcaaaaatagccgctacttttggcacagtgcatgagggcatacattgaaacattgtcctgtaaggggtattgcttgcctgccacaggtggtgcatggtgtgaatgcggcatcatccatatatgtgcaatgccatatatgctgcacgacaatcctgcatgacggaatacattgcatccgtgcaatgcagtatgggatacattgaaccccatattgcatgaatgcaatgcaccttatatggcaatgcccatcggcaaccggtattacactggtgcaatatggtatgcaatgtattcatgcaaaccggcaaacaatgcgtcattgccgtataccaacggatgcattgccgtgtgatgaaacgaaaaaatccggacagatatgaaacaaattatacactctaaattcaagcctatgaagaaagaacctttatttgtcgctttgagcaaccagaaaggcggtgtgggaaaatccacgttcacggtattgctcgccagttacttccattacctgaaggggtataacgtactggtggtggattgtgattatccacagcacagcatcagtaccatgcggaactgggaagtgggaaacattgagaagaacgtgcatctgcaaaaccagctggtggaacagttcggagcaagcggtaggaaagcctacagcatcctgaactccactccggaagaagcccgggaaacggccggacgctttcttgaaaaatcggagctggattatgatcttgtcctttttgaccttccgggtaccgtaaatgtgcccggtgtattccagtccgtaatcaatatggattatgtattcacccccatcacgcaggaaagaatggcaatgcggagcagcatgtcttttgtccttgccatccgggaatacatgcaccggcataaggatgtacccttgcgtggtatccatatgttttggaaccggatggacaaacgtgtttccaaagacctgtataacggctatactgaaattttccgttcgctgaaattgccggtactggaaaccgtcattcccagtgcagaacgttacaaaaaagactccggaatgaaagggcctctgttccgcagcactttgttccctccatcttcctccgcaatgaaaggaagcagtctggacctgctggcagcggaaatagaaaccatactgaaacttcaataaaaacaattatgactaccaaaagaagaacggattaccaagtggatgaggaggcattgaaacgcatgatggcaggagatgtgaccgctttggaaagaacggttcctccggaagaggagccggaaacaaaaagtcaggctggaccttgttcggagaaacaggagaagaaaagcggttcttccagacagcaaataaaaaaagcaccggatggagcggctgattcagatgaataccggagccggtttctgaaagtgaaactgtcgggagcaagaaggcagacctatattaacgatacattgtacagaactgttgccaaagtattgccggtcattgcaccggaaatgtctgtccccatgtttttaggaagtgtactgtcagaccatctggaaaggtatcagcatatcatcaatgaaatatataatcaagaagcaactcaaaagccaatagaatggaagaaatagtttatttatcaatacggttcggctgtaccgcttatctgttatataaggtatggaaacaaaaagagagaataggtaaaatctgtgatctgctttgtactcctcgcaatcggccacaagcagaaaaagacaacggtgaaccgggaaatgcacaggatgtgatgggagctacccgctttgtctatctggacgagaatgccgggaagaccgtcgccccttacatgagccagcaactggaaaccggaagtgattttatcggagcggataaggatattccggaagatgaagtggaatgcaaactgcctttggaggagatgagaatgctgaaagatgaacaggaggaactggacagccgctctcccgaaacggaagccattgctccgatggttactcctgctgacctgctcaatgtaggcgacgtgctgcttaacctgaatggcgccggctcggacgagaacaaatcatacagggcggccatgacactgcattccatccgggaaacggacatgtttgaactgttctcctcccaggtggagaacaagaagctgattgaggaactgatggggaagtatgtggataaggaagggaatgcgttgcctttgaaaagagagaggaaagaaagcaaacatgttactgactggaggaatctagtctgaaaaggcaatatttatcatgttcggaaaatcctgtatgcgttaaagtatatgggattttttatatgatgtacccatttaacgaaaacatgcaacaggcattcttccaaagtggaggaaacctgttttttctttttcatccgttgtacggcaaagacatctgatgacatttgatgacatctgatgacacctctgaatcatagcgtattatccccatttatctttgttgtcgaattcaaatttatgtcttacccaaacgattcgacaatgaaaagaagaatccttttttctgtgatgtgtgcggtcatcgccgcaaacacctttgcgcagggccagggccttgcgggtatcaacgaggcaaccagcctcatgacctcgtatttcgatcccgccaccaaactatgctatgccatcggtgcggtgcttggtctggtaggcggtatcaagacctatggcaaattttccagcggagatcctgacacttcgaaaaccgccgccagctggttctttgcctgtatctttctgatcgtagccgccaccatcttacgttccttcttcctctaaagcctatggaatatccggtaaacaaaggtgccggcaaccccgtcgagttcaaaggactcaagtcgcaatacctgttcgtctttgccggagggcttgcgatggtgctccttatggtagtctttctttacctgacgggggtggaccaatggatatgcttatccttcggaatcctgtccggcagcctgttggtgtgggtgatattccgtttgaatgcccgttacggtgaacacgggctgatgaagctgctggctgaaaaacgacatccacgctatctgattcaccgcaagagagttttcagattattcacaagaagaaaaaaacaacaatcatgagaaatgtattaaaggcggaaacgctggaacgcagattccccctgctatcggtagaaaacggctgtatcgtgagcaaggatgcagacctgaccgtggctttcgaagtggaactgcccgaactgtacacggtaacggcagacgagtatgaggccatgcactcctcctggatcaaagccatgaaggtattgccggaacatagtgtcgtctgcaaacaggactggttcgtcaaggaaacctaccgtccgaagaccgatgacggagaacagagcttcttgacacgcagctatgagctgcatttcaatgaaagaccttacctgaatcacaaatgctacctgttcctgacgaagacaacccgcgaacgcagccgtcggaagagtgacttcaataccctttgccggggattcctgttgcccaaagagataaccgacaaggatgctgccgcccgctttcttgaggcggtggaacagttcgagcgtattatgaatgattccggacatataaggcttcgccgtctggaaacagacgaaatcaccggtacgaaggaacgtcccggactggtggaaaaatacttttccctctcgctgaaggatgagaccgccgtattgcaggacatctgcctcaagcccggcaggatgcgcatcggtgacaaacgcctctgcctgcataccctttccgatacggaagacctgcccggcagactttccacggacatgcgctacgagaggatgtccacggaccgcagcgactgccgcctctcctttgccgcacccgtaggactgctgctgtcatgcaaccacatatattcgcaatacgtgttcatcgacgacgcacaggaaatcctgcagatgatggagaaaaactcgcgcaatatgctctcgttgtcaaaatacagccggagcaatgccattaaccaggagtggacggagatgtatcttgatgaggcacataccaaaggagtgcttcccgtcagatgccactgcaacgtcatcgcctgggcggaggatgcggaagagttccgccgcatcaggaacgacacgggcagccagctggccatgatggaatgcacgccaaggtataacaccattgacacaccggtcatctattgggcgggaatccccggaaatgcaggcgactttccatctgaagaatccttttataccttcctggaacaggccgtatgcctctttgccggagagaccaattacaggagctcgcccagtccgttcggcatccggctggcagaccgccagaacgggataccggtgcatgtggatatttccgacctgcccatgaagcgaggaatcatcaccaacagaaataagttcattcttgggccttcgggcagcggaaaatcctttttcaccaaccaccttgtccgccaatactacgaacagggagcgcatatcctgctggtggacactggaaacagctaccaggggctgtgcaggatgatccatgaccgtaccaacgggaaggacgggatttacatcacgtatgaagaggacaatccgatatccttcaacccgttctacaccgaatccggaaaattcgatgtggagaagcgtgacagtatcaacacgctgatactgaccttgtggaaacgggaggacgagtcgccgaaacgttcggaggaggtcgctctttccggagcagtgaacgcctatatccgaaagatttcggagaaccggaacatcagaccggacttcaacggtttctatgagtttgtcgccgatgactacagaagaatgattgaagagaaaaaggtgcgtgagaaggattttgacattgacggttttttgaacgttctggaaccgttctaccggggcggagattatgacttcctgctgaactccgacaaggaactggacctgacaggcaaacggttcatcgtattcgaactggacaatatcagcagcaacaaagtgcttcttccagtggtgacactgatcattatggaaactttcatcgccaagatgcgcaggctcaaaggtatccgtaagatgatattgatagaggaatgctggaaagccctgatgtccgccaatatgagtgaatacatcaagtacctttttaagaccgtcagaaaatatttcggcgaggctgtggtggtgacacaggaggtggacgacatcatcagctccccgattgtgaaagaggccatcatcaacaactctgactgcaagatcctgcttgaccagcggaaatacatgaacaagttcgagcacatccagcggctgctcggtctgaccgagaaagagaaagggcagattctttccatcaaccaggcgaaccatcccgggcgcttctaccgggaagtatggatagggcttggaggaacctgctcggcagtatatgccacggaagtgagcgaggaagaatacttcacgttcacgaccgaggagtcggagaaactggaagtacaacggattgccggaggaccggagggcagtctggaaggagccatccgccgtctggcggagaaaaagcgagaggaacagaaacaggtatcaaacccgaaatgaaaacgattatgagaaacagaccccttatgaggctggcggtatgtctgataagcatggccgccatgatattacagagctgttcggaaagcggtatcgaccgcgacaagatctgcggaacgtggaccagcgtggaaggcagacctgacgtgctggtatacaaggaaggagaatgctataaggtgacggtgttttcccgtagcgggagaacccgaaggctgaagccgcagacttacctgctggtggaagaaaacggaaacctgtttgtcaatacgggctaccgtgtcgatgtgtcctacaatgaggcagtcgacgtgctgacattctcaccgggcggagactatgtaaggaaggaggaacgggcatgaaggcaagaacgcttctgatcggaacggcatttgtactgggcgttaccggagcacgcgcccaatgggtggtgacagatcccggcaatctggcccaaagcatcataaacatgtcggacaatatcgcccatacctcaaagacggcagtcaatacggcagaaagctttgccgagacagtaaagatctatgagcaggccaagaaatattacgaccagctgaaatcggtcaacaacctgatacaggatgcccgcaaggtgcgtgacatcatcctgatggtgggcgacgtgtccgacatctatgtaaccaacttcggcaagatgatgaacgatgaaaacttctcaccgcgcgaactggacgccatcgccttcggttacacccgcctgctggaagagagcaacggcgtgttgcaggatctgaaacaggttatcaatgtcagtaccctgtccatgaccgacaaggaccgtatggacgtggtggacaactgctattacgagatgcgccgttaccgcaaccttgtgagctattatacgaacaagaacatagccgtaagctacctcagggccagaaagaagaacgacctggaacgtgtgatgcggctctatgggaatgaaacctccaaatactggtagccatgatgccgttgtcgatagattttgccaacctgcacaccatactggcaaccctgtatgacgagatgcttcccctttgcgaggacatgatggacgtgggcaagggacttgccggactgggtgcgttgttctacgttgccgtccgtgtatggcagtcgatggcacgtgccgaaccgatagatgtttatcccctgctgcgtccctttgccataggcatctgcatcctgctctttcccacgctggtgctcggcacgctgaacaatattctcagtcccatcgtgcagggcacacacaagatgctcgaaggacagacgatggatatggaacagtaccggatccaaaaggaggaactggaaaaggaggccatgctccgcaatcccgaaacagcatatctggtaagtgacgaggagtttgaccgtcagctggatgaactgggctggtcaaccatagataccgcctcccggctgggcatgtatgtggaagtcgggatgtataatctggaaaagaaaatccgggatgcattccgcagcctgctggagctgatattcgcagcggcatcgctgctgatagacaccgtgaggacttttttcctggtcgtactctcgatactgggaccggtagcgttcgccttcagtgtatgggacggattccagtccacgctcggacagtggttcacgagatatatttccgtttacctgtggcttccggtcagcgacctgttcagcaccctgcttgccaagcttcaggtactgatgcttcagaatgacattcaggaactgcagaacaatccggactactcgatagacaactcgaacagtgtctacatcatctttatgctgatcgggattatcggatacttcaccgtgcctacggtagcaggctggatagtgcaggcaggcggtgccggaaacttcagccgtaacctgaaccgtacagccaccaagacaggggggcttgcagccggagcaggcggtgccgtattggggaatatcggaggcaggctgaggggcaaataaaccctgcggagcctccttcccatgagtcgggcaacccaagatgacgggtccggtgacttgtcggaacgggatgtcccgtcataccggaaatatttattcattcaaaccagacatcaaaaaaatggaattcaagtcattgacaaacattgagagcagcttcaagcgcatccgcctgctgctggcggtctttgcctgctgctgtgcgctcgttaccggatatgcgctgtggagctcataccgctttgccgagaagcaacgcgagaaaatctatgtgcttgacgggggcaaatcgctgatgatggccctttcgcaggacctctcacagaacaggcctgccgaggcgcgggaacatgtaaggcgctttcacgaactgtttttctcgctctcaccccagaaggatgccatcgagcacaatatcaaccgtgccctgcaactggcagacaagagtgcctatcactactatgtggattttgccgaaagagggtattacaaccgcctgatttcaggcaacatcaaccaggtggtgcatgtggacagcgtggtgtgcgactttgccgcctacccttacaaggtgcggacatacgcccggcagctgattatccgtgaaagcaacgtgaccgagcgcagcctcgtaacttcctgctcgcttcaaaacacaggacgttcggatgacaatcccaacggattcattatcgagcagtttaccgtgctggagaataaggacataagaagtgcggaacgatgaggggaaaacgcggattcttcggccatgcggacagccgggtacggctgttctgccggcggctgacaggaaagcagcgcatccttctggcaggcacggtctcgttcctgcttgctgcctcctgtctgtactcgattctctcctgtgtatcccgtttcggggagccgggccaaagaccggcaatgggacatatccgttccgtcgtgttccggtcggaaagaacaagaaacattcattcaaacatccataaacatgaaaatggactttcagaaaatcagggaacggctcggagtgtcaaatgacaagccgctgactcccgaagagaagcgccggcgcgcaaagtatattgtctatccgtttctctgcctgctgtgcatggggttcctcctgctggtattcagtccgtcggaaaaggagaaggcggaaatggaaaaaggcaagggtttcaacgtggagatgccttcaccggaagattcggaaatggagggcaacaaggtaagcgcctatgagcaggaagcactggcaaaaaaggaaaaatggcgcaggggaaccttccaggagatgtccgaactgctcaacaagggcggtcaggatactgccggtcttactgcaggaaaagcaaacatggaacttccgccggaaccggaaaaggggaaagcccccggctccatccgttcctctgcagaagcctaccggaatatgaaccgttcgctgggcactgtatatacccggaatgaaaatcagccagatgccgatctgctccgccgtattgaggatctggaaaaagaaaggaagccggcggaagaacaggcggaaggccagaccctggaagaaaagatggctctgctggaaaagtcctacgagctggctgcccgctacaacgggaaagagcctgatgcttcctctacggccaatgccccaaacagccggaaagaacggacggctgtccggcctgtaaaacgggtacagaaccggatggtgtcatcactcgcccagcctgcaggcaatgaagacattgcttccggatatgcaggcgagagaaataccggcttccacaccccggtaggcaaaatgccatcttccggcaggaacaccatcgccgcctgtgtgcatggcacgcagaccgtatctgacggacaggcactgcgtatccgcctgcttgagccgatggcagtggacgatctccttatccccaaaggtacggtactggtcggcggtacacgtgtcgagggggaacggatgggaatcctgatcgagacagtggagtacaggggcacgctgtttccggtggaactcgaagtgtatgacgctgacgggcagcagggaatccttgtaccgaactcgatggagtatgatgccgcacgtgagattgccgccggcatgggcacctctataggaagcagcatcaatatctcaacggatgccggagcgcagattgcctcggatgtgggcaagggggtgatacagggtatgtcacaatatgtgggcaagaagatgcgcacggtgaaaatcaccctgaaggccggacaccggctgttgctgcattctcctgaaaaatgaaggaggaaaggaaatcaaccatttattcaccaatcaaccaagaaacacacatgaagaagattctgatgatgcttgccctgattgcgggcacagtggctgcatacgcgcagcagagcagcggggattattatgaaggactgagccgcaagatcggattcagccggatgattcccccacacggtctggaaatcacatatgacaagaccgtacatattatttttccctctcccgtgagatatgtggacctgggttcgcccaatctgatagcgggcaaggcggacggtgcggaaaatgtgatccgtgtgaaggcaacccggaaacatttccggagtgagacaaacatgagcgtaattaccgaagacggcaacttctatacattcaacgtcaagtatgccgacgagcctttgctgctgaatgtggaaatgtgcgacttcatccatgacggagaggccgtgaaccgtccgaacaatgcgatggaaatctacttgcaggaactcgccggggagtctccccgtctggtacggctgatcatgaaatccgtgtatgaacagaacaaacgcaaggtcaagcacatcggctgcaaacggttcggagtgcaatatctgcttaaaggactttatgcgcacggcgaactgatctatttccataccgaagtgaagaacgccacgaacgtgcctttcgacgtggacttcgtgaccttcaagatcgtggacaagaaaatcatgaaacgtaccgccatgcaggaacaggtcatctatccgcttcgtgccttcaactatgtgacccgtgtggacgggaagaagaacgagcggacggtgtttgccctgcccaagttcaccattcccgacgacaagaagctgatagtggaaatgtatgagaagcaaggcggccggcatcagtcctttgatgtagagaatgaggacctggtacgcgcagaaaccgtcaatgaactgaaagtcagatgaacgccatgaaaagaaactccctctttattaccctcctgcttgccctctttacggggcaggcagaagcccaacgccgcctgccgggaatgaaagccgtccgcttcaccactgaaatggccgacggattttacagccgggcaaaccgtcacgatgcaggctatgccttctcgctggctgtatccacctgtaccgggaacagaaaccagtggatgtttggcggtgagatgctgaaacgtaacatcccttaccggagtacgcatatacccttgtcgcaatatacgggggaaggcggttattaccatacgttcttttccacccccggcaagtccttcttcctgaacctcggcgcttccgccctgttgggctatgagaccgtgaacgaaggagaccggctgctggatgacggagccgttttgcagcaatgcgagtctttcatctatggcggcgcggtaacgctggaagcggaaggatacctgtccgacagggttgtcctgctggtgcgtctgcgtgagcgtttcgtgtggggcagcgcctcgggaatctgccacttccagtatggaatcggagtaaaatacattttctaaccttaaaagaatacatacccatgaaaagaaaaatccttgattttatgctgacagcctgctgtatggcattctcctttcttggtcttgtcgcttgtgacaatgagctggatatcaaacaggaatacccgtttgcggtagaagccatgccggtagcggatgagattaccgatggggagactgtggaaatccggctggaaatcaagccggaagggaactttaccggaaccgtctatacgctaaggtatttccagccggatggtaagggcagtctgaagatggaggacggaacggtactgaagcccaatgaccgttatctgctgaacgaatggaaattccgtctttactatacttcgcaaagcggcaaggaatcccagaccatagacctctatcttgaagataattgggggaatctgcaacaattgacatatgattttaatggaaaggatacggatgaagaaaataacaaggaggctgcatgaaaagaataccggctgttatgatctttctgttacttgtcttgtacggcaaggcggaaaatcccccgtctgacaaagataaggcggtagcctgcatcaagcggtgggaaggctggcaccgggggaaaatgccttacatcggttacggacaccgcctgcttccccacgagacgctgaccgagaacctgagtgaggcacaggcggactcacttttgagatgcgaccttgaacggtgtttgaaggtattccgaaaatatgggaaagattcgctccttttaagtctgttaggctttaatgtaggctgttaccgtctgatcggcaacggcaagatacctaaaagcaaactgattcagaaactggacagcggcaaccgggatatttacaaggaatatgtatcgttccgctgttatcgggggaaagtcattccaagcatagagagaagaagaaaagaggagtttgaactgttctatataccgtagattgcttgttgataaaggtttggttgttacgagacgaccgaatcttttttatttgtccggtatgaacatatccctaacaggtgttgtattttaatgtaaccgaaagacataaaatgtgttattgagcatatggtgcataaaaaatgctctttgaacattgtctttcttgattttttgctaagtttgagatgtaatgtcaaatgcataaaacaagtcgtcatgaattcagaaataatattggaaataaatggctacaaatgcaatctactaaagtataaatactgtttttcccgtaatatagaccgtaaaggaagacctgtaacaggaatgttaggaggaaacatatatatagaaatggaatctaatggcagcaattgtattttggatatgatgcttgttgatacggatcggcagcgttccgctttcttttctcatgcagaaccttttccggtttgggggaagatactgcatagcatagacgatatgatgtttcgtgaacttttacttcgtatcgttatatcattgaaaagtttacggatacaaaaaacgcctaagctatcacctaattgtggcaatttgcgatgaaacctttctgaaagtaagtgtaaccgcaaagaatgcttttcttcgtctttatactcgaattgcttttcaaacataatctgattgttctgttctcctttgacaatgatagtggcttccttaccattgtgggcttgtacttcaattgaaattattgttctgttcatacttacaaattttctttattctatatataaaactttgggaaagatatatgagtgacattttgtcagaatagagatataggcatacctcttgtacatataaaagtgtcccctaatattcgtagtatcaggaggaaaaggattcgtttaacactgtaaaattgaacaaaatatggtataaatattggattgaatttaccccatagggaataagacaaaagcttatttggttagagaagtgattggtaataaacttgctcttaccgcacccgattatactcgtttatacttgggtatgtctgaagttgaaaagataacggactgtaatgtgttatttaaactgggaaaaatagatttttaaatattggaatatgaaagaagaaagatttattgaagaagattttgaaggttttctggaggacttgataaagtctggtcgtttagatgacaaagaagctggtatagctaaaaggatgttggacaaaggatatgacaatttatctgataaacaaaagtatgtctttaataagatgattaggaataacagcgttgaggaatgtcaaagatgtgcttgtgatattccttggtctgaaatgcttgaagctcttgataatggcggttattgtaactactgtcagcatatgatggagaaactggaaaacgagtaagaaaataacgggaatagctatcaaggttattcccgttaatgtttaatcagttattataaatcagacaagcctatttagggtattgtcgtaaatactcacctcatataaataataaataaggacatttttcccaaccatattatgattatatgaacgaaaaccataaagacacattacatattgaaagtattcagcaactaaaaaaacaagaatcctgatttagttgatgcttttctggaaggagatagtcttttatttagagtgcactataatcaaaatttaattccatatacttaccctgttcaagttaaataacgagcaaatagctgcttggataaaatgacttgaatagtcaaattagatacatttacaaagcgggcagagtcataaaatgggaaagggctaaaaacagaaacgccacaggtatgatgtgatatacatcaccttgtgacgtttctgtttttttaagatgtatttgtctgctattcttacttttgaagcaagtattcccctattgaaagataccggtctttgattgtggcattttcattgaatccattcagacaatggagcaaggctttctccaaagtggtgtatctgcggttaaaacattgcggattgtccaggcaataggcattcaaggcatatctgtatggggcatattcaggattatcctcttttgtgattttcacatgccaaggaaagtgtatccgcagagtgaatgaccgtgtttccccttttgtaatccgttcctcttcctccagcatttttttcacgagggacctgtccagcaacggatatccatattccctgtaatgtttgatatggcagcaatactccgttgcgtattgcttcaattcttccggtcttataccatagtgcttcccatagaaaagcagcacttccctgcctgttacgataacgggctttccgtccgcttcatgtttaaatacctgccgttccatcttttccctgtctgtcagcaaggcaaaaccgaaacattccgtaagggtgaaactttccctgccgggaacggacagcccaataaggctttccaatgtgtggcagtaaaagaaaataccgtcatcggccataccggtgtccggtgaaagcataattcttacatccttgacctgaccgctgtccctttggacaatccggcaatttgcgtaatgtggctcacaagcattctctttcttgaacctgtggtatttctccaaaatttcgttccggatttcctccttgtcggtcagggcaactcccaatccgcagttttcgcaccacccgtaataaaaagcttcgtccgtgaagtggtcgaactcttttgtgttggggtttaccattgcctcacacctgacattggccgatccgcatctgctgcacactatattattttccattgttcttctgctttacgggcgactcacggccgcccttgtcatacaattcggttgttattctcttaatttatctttacccggttcatcagctgtcccgaaatttcatgcagttcccggcagcgttctggctgctgttcccttgcaaaggcggtgattccctgtgtcagtttccatagcgtggccccgcctgtaactccgtcgtcaggattgttgttcatcagcagtttctcgacctcacgtccctcgtttttcaacaaggctcctttctgcaccagattcttcagttccttgtcgaaatccacgtctatctccgatgctccttgaatttcgatggccttctgcatgatggtgtctttgctgtacagtcctttggtcaggtcggaaacagccgatacggtggtctgcgtgtccagttcgtaggtcttttgggagagggacagggattccggcagtcggcctccaaggtgtatctgccgcatgacggactccctgaccatcccgttcaggcacgccccgttgagcaggaacgaccgcatatcgaccgatccgttgccatagtcggatgtggagaagcgtgctcctgcgaagatgatgaccgttccgttcttacgggtgggtatctctatcggagtgggcaggattgtttcacaccatactttcgtgtcgttcatataggcatcggacacgaccgctccctgtcctcccgcctcacggatgaaagcggtcagtatatccaccgagttcagccgacggtaggagtccgacaatacgccccggacttccattcctaccgcccgtatcagtacccgtgtacgctcggtccatcccgaatgctcgttcaggatggtggcgcacaactgtttctgccaaacatccccggcggaaagctcgcgcaggtatttggcgggaatgcccatcttctccgaaatctggcttatggcgttgccgtgcaggttgaagttcccttcgggcattgccatctgtacccttccttccgctttgaaagagataacggggcgttccttgctacgttggcttaccccgatgggagcgatgaaatcctgcgcgatccgtccctcactgagcagacggttaatggtgtccatgacaccaccttgcctgccttctatcatccgctgtaccttgttaatgactacctggttgaggccctgctgcttctgtaccgatgcagctgccggcattactgttgtttccataatactatgtttttaatgttgatgaatcagaatttattcttagagcttgtcttggttgttttagcatgtcccatgtatttttcttctgacaaacggatataatcctcttcgctatatccggtcagcccgaacagttcataatatccggggaaagtttttttccccgcttccggtatatgcatgctggttcccttgtggcagcagatgatatgccggacaaagcggtaacacttgcaaagatcagccacgacggtatattcgttgtccgtatgaggttcgtaatatccacaggaaagattgatacaggatacttccagaccgttccttttcaaagccgccacatctgtattcagtccctgtgccggcttgtagccgtacttccggacatctatagctgaaatgaactcgttggagcagagcttcatcccattgatttgtgttaccatatccccgttccctttccggtcacactgaatcacgaaacggcaatcggaaaagaaggacatatcggcatggctgctgcctatgcatcccacctcctcctgtacgaagaaggcacatttcaccgtcttgcaatcctccaggcatttcaggcagatccagatgccgttcttgtcatccgcaccgattccggtcatccgtttacgcttgtgatcatagccgacaatcatcgagtccgccacaagatgggctgcataagagcctgtcttgcgccggtgtacctcatccatgtgcgccacgacacaggggtagctttcccggttgcctttgaccgcatagatgtttccgtacctgtcttgccggaaaggaatctccatccttttgagttcctctatgatgaatttagccatcttcccctctctgccagagggggaagaaatgccgtaaagagccattagtttttccatgataatgatattttaggaaatgaacaatttttcgatttgcaggtatcgtctgaattccggtacgggacgccctttacgaaagagaaaagacggatatttctttcctttatattccactgataatcctttcaggactttcccgaatacggtagatacatagtacatatcctgacagttcttgcagaatgccgcatccgggaagatatgtatcttcccgcatttgggacatacatattttttcctgtttgcacacccttccgtgctccggcaggtggctatgctcgtgtcgccctccgtatttctcagttccaggttaccgtccgtcagatgaaggctgtagaacgtgtcgaggtaaggcacccctttcttgtgccacctgcaggcgggcactttcaccgtcaaagagacctgtatattatctccggccgcccattcctgcccctcaatgggattcagtacggtgaaatccgtcgtatgtgtataatcgttgtatctgcgtcgcaacaggatgcctgcctcctgcgcctgcttgcggatcagttcgacgacgaatgcgtgtgaggaatagatacgatccagcagggaggcggcaatcggtgtgtttattgatttccacaatgttatctcgttccatacaatggcccgtccgaccacattgctgctgtcatcccttgccacgagtattttggctcctgcgaaattggcatagaaatccgctgcattacgggccttgtcttcatatctcatacaggagttgtgcaggctggattcgctaccgtcagatatgggactatagttgctttccagataagcctccataaaatcgttcatactgtcatgcagtctgattgtgaccttgctgtccagtgagatggcgctgcagaaatagttgatttcatcgggctggtacggtcccagatttttgaacagctcgataaacgtggacggttccagatctgtccggttctccggaaaccagggtgcctgcggattgttccggtccgggaaattgggatggcccaagtctttgttgcatgccgtgaacacgatccggattttcttgaacgtgccggcttccgtccgtttgcgtttggtggagaaaaaattgtaggacccccgtatgacttcttccaccggtacattcttttttacttccgaaaggatatctttggctatcacacttccgttttccgccgcatgggtcaggcgggatttcaattcgttgctaacattcagtttcataatcattcggtttattgtttataaattctgttgtttatatggcaattgtttcttgccaggctgcatttggcgcaatttctctttccgctttctgagcaggtcaacggacatgttcctgcttgtccgatattcctcctcactcatccggcgaatggagggaatgcccgtccgggtcagcgtatggtttaccatccagccgtccatgaagttttcggggcagaggctgtcatggtggatgacctcacctatgcagccatgtacgagcatgttgcaaacggtcatcaggcaacaggtacggctgacatcctctgcaaccagataattacccaggtggcgtacatgatatgccagcagcagccttccgcttccgcatgtcgggtcacagatacgttttcctgtcgctgtctcccccgaatcggtacataagaccatcaggtcgcagatatccggcggagtgaagaactgtccgttcacctgccgaccgcttttggaggatattgccatgaagaggtcaccgaacgcatcaaaccatccgccggattgcaattcccgctgcatgagccgtatccatccggtaagcatttccataaaatgcctgttctgctgccgtttgtatttccagtccataaggggcggtgcgccgggagagaacccgtgaatgacatagcgcaggaaatcgttgaaaacggatatcggatcgtagccgttcgaataggcgaaatcacagaccattttctcaagcggacgtatcgcctgcggtgtgttgtatggtaccatattactctgattttttatagattgttactatatgtcttttatggtcagtctgtatcctgacgggagaaatgccaaggaaagagagatgggtgtccgctttcagcatgttccattcccatgcgggaagttccttccattccatacggtatgcccagagtatgaacagaccgggacggaatccgttgaaaagctttccgtgcagaatcccgaccagccgttccagttcttcccgcgagtaaagggtgaatgcctcattccgatagacaaaggcatcagccggttcaatatccggctgacactcgatgaggtatctcttccattcttttgtggtgtactttccgtacagaggatcgggttccgtgtatttccatgccctgacgaatgtgtggaagaggacggcaccgttcctgtgccttccggtatgcccccacatccggaactgtttgctgcgtatgccatcgggaatcagcaattccggaccggttgtaacccaagggcctccttcggtattgtaaccggtacacttttcattttcatggcaaaaaggtgtctgtgggagaaggcagatatgaacttcccggtcatcgcccctttcaatgtgtgcctgcggataatagtcaccgccacgggtgatataagtgacaacgtctcctgcagtcggtaaaccggctctttccctgtcctcccgcatccttgaaatcagccggttcaccttctccacatcacattcctttatggagcaggcacacccttcatgcctgttgagcagagtcagactttccaggtcataaaaattaccgtacttcatattgagatcgtttttgttgatacaatttgacctgacgggcaaccatgtcgcagaacttctgtccgttctccttctcgcttctgaaataggcaatcatgtcccagagattccgattgaagtagccggtccatttttcgtaatagtgacctccatagacctttccgaacgtttcctcgaaaagtgcaggagtcagcccttcatccccgtggtggttgtattgccacagggagacaagcagcagctggttataatccagtgtttccatatctgttcttttttaagtaaaacatcggcctacatgggtaggcatttttatttcttgatgtctttcctgtctgttttccggggattgcggcaaggcttggcgaaagaaaataccgcagcgaagcgaggatgattttctttcagccaacccagcccctgaaaggggccgccttgcacaatcagcccggaaaacggctatctttacagcaagaaatgaaaaagcagacctcggattctctgttctgaagtctgcttttcggtcattgtcaagtttcatgtttttcaggtatgtatctgccatccgtggaacggctgcaatgttacggcaaacgacctgtcaggtattccatgatagagcagacctcccacgatacctgtccttccgtcgggatagtgctgtgtgaagccgaacgagtacggggcatggtcatagtagagtgagatttcgcagggataatcaggattcccttcccaactcttcaaccgttccaagcacttttgaagtgaggtgtcaccgatggattcggcatagcgctttacgttctcgaaatgttcttcattcaggattttcataacttttgtatttttatcagttaaacacgtccggctccgggagccggtatttttatttctcgcctgcctgacagtcccgtggccgtacccgcaaggtttggcgaaagaaaataccgcagcgaagcgaggatgattttctttcagccaaccccgcaggggcctgaccttgtacgggtacacaggacacgggactacctttgcagggtgggaaataaaatatacggttgttttttgttgtgggattttgtgtggattccttagataatcttcctgatttgttcgccattgccggacaaatgctgtatttttgcaatttctaatttcaggattatggaaaactatgtaaagaaagcggcggatgctttccttgtggagcgtccgtacggtatgcgtgtggattacaggaagaaaggattcgtgctgtttaaccgtaacctcaatgtgttgggaaatgcggaacagacccgtctggaagaactacctctggagcggttcaatgtggaggagattccgttggagggtgaagtcgtggaggaacacgcgggatttaccgatgtattcttctataccgatctgaccaatccctatgccggatatgtactgaatttgcaaaagcttaaagcctataaccggttgatgtttccgctggcaatggcgctgaaccgtgaattgtgaggccggaagccggtagcggtaacagctgcatggagcagaccgttaccgccccggatttaattatttgccctctttttctgttatgaacgccagatagacggacacggccttatggcatccggtaaagtccggagtccggcagcccttgattttccggaaactgacggttccgttcctgtcaatgcccctcacatgcctgttgaatgtccctttggttctgatatggatgtcaaaaccgtcccttccggtgatttcaaggaacatttctcccgtgatccgttccccgtccaggaatttctgtttctgttcattgagcagccgctgatgttgctcttcctgcactttgcgctcttccgcctctttctccttctgctccctgcgtttctgctcctgtattcttttatattcctcacgggcttgcaccaagggggtggtgtcaagtccgagagcttcgaacacgcggacggagatcaaattgacgaaggctcctctttccgcactttgaagcgtatccgcaatccagttcctgcaataggtggcggcttcctctctgcaaccttctcccttgaggaaccggcgtgaatactgcccgctagagaaataaacgttttcaatccggcagaccacatggaaacagtcatcgtcttcattcccgtattcgttctttctcgacagggagagatatacattctccgcgtacggctccagttccatataaggagccacgacggtattcccatcagacttgtacttgaatacttttgctttcatactatcgttcagtttgtcggttgttgcatatttcatctataatctctttcccgcttctttcacccttcaggaaggcaaggaagcgcctcaaaaagagccgggcacagtcagttcccagctggaagctttcaccgtctttggtagcacatacagcaaaacgccccagtccgaaactgtcctgttgtggtacgatgtggtaagacaagtcctcgcttgcgttgatgtgcaacccacgacggaaaacatagaaagttttcgggattcttctgtcggtatcgatttccatacgcttgtaaccgtgatgttccaataatcggcccagttccctgtttgtcggaattgtatgtccgatccagtccggccagcttatattttctattgtgtgtccgtaattgtcatataatatgttgaactgttcctggtattcatcgtaaaattccccgttcccgttgcacatttcctccaacgcgatgccgtttttacggacaagggcaaggtcgcccagtccgcacgcgatttcattgagcagcgtgcgttcctcatccctgttctttgccgttccgtaaattctaagccgggaatatcggtgtagcgccgaacgggacggcatatccagtttttcccatattccatcgtttcctatagcctgtctggtgtttcccggaagtccgtaccaccacttgtccaaattgtttgtatccataatttctgaatcagattgttttcaaattctgttttgagtaccatgcctgatacgcggcggcatactcctgacgttcccgttccagggaatttctcatttcaggggtgtacccgagcaggcggatgtatcctccgttatagccggtgggttcgcactttattccggcttcctccagtttgtcgatgcgtttttgggccatttttgcgcttgaatattccttcggccaaaaatagacttcgccccgtgagccgaaacagtcttcccccagaattatttccccggcatacttccggctttcgatgatgccgaaacgcgctttgcccaatgcctggcgcattgccttgtgtgccggaccttccggatgcttgaatacctccggcttgtctttgctgccgagtttgggcggttccaccttgtacggctgtttgtaacttccgattccgagcgtcaggtaaaagttggtatgaaaatagtccgtcatgggggcgctgtcatcgaaattgtacgacatgacgaaatcgcagatattcatcattacatcctttgccctgtccgtcaatgatttgtctgaatggatatgatggtggttgacatcgccttgaacttttccggactctttggtgaacgcctcgaaatccgctttcatcaaccggatatggatggagtggtaattctcccgtctggcagagaacttgtatcccggataggtctccttgagccatgcccgtaccagtcccacgatttccggagcgtgctgccccttgtaattgcggcctttccagcggtattcgttatacacatacccggtgtattcctttgccgtggctcccggatagtcatattcatatccggttgaggtcgagggaatatccggtttttctttccaagcctcaaaaagccttccaaactcggtggtcacctgttgcatgattgcggtgtcaccacccttgtccgggtggtgctccaatgccagccggcggtattctttcttcaagtccgccagagagtgtatgttctgaaaataagtcatagccataagttttttatgcccctgcgaggcggttgataaaatattcccggtagtcaagctcaaaaccgaggttgagacaggccgtttccatgtcatcttctctcaggtcgtccgcctcctgcaattcgcgcaggtaccgtatttcggagtccaggtattcctgtgcttccgtttgaccgcaaccgcatgagttgcagatcagactgataatgtttccctgcatgctgtttgattttttatgtttctgttcctgtttctgaggcctcgtccgtcatatatcgagacggcccgttccaccagaatcctgcggttgtcttccgagagttccaggtagaaccgttccgccgcgccgaatgtgcccttgtctgtcgccacgcaccatttttcccagaaatgcgggtacatgccgccatacacggctttgcattcctcctcgctccaggcgttccacatgtagtagaagaaactggagacggtattttccgcttgatatttcatggttcttctatttgtgattctacattgtttgtttctctcagttgatgccacacagcctcatacatctcatgaagccagtctatgttctttgcgccgagttcaaacgggctgtgacactgcacctcgtcaccgctttctttctcttcggcaaggacggtcaggctgtccgccgttacccggagtcctgtcaccctgcattcatatggttctccgttcttgccaaaccatatcacccagaccggatcataatcctcttccggaagacgaatttctttcatgcagtgagcatggagcaactgccgtatcgcgtcgatgatgtccccccgcagttccttgatcctgccgctgaaatcaacggcttctgacggtaaacttccttttccgcctctttcctgcaaggagagaatccgcgtgtcgggatggatacagaaatcccactccaacacttcatcgtcatcgcgtgtcgtgtggatatcgccgcccaaaacaagaccgcaatcgtcatttaccattctttttgcttcatcgcggtcttctgccgctaccgtgtaagtgccctcgaaggaataccttactcttatgtcatatcttttcatgattctttccatttgattgttgataccagattcattgcccggaaggattaccggatattcaatattgcgctaaagacatgtgggtcaagcctgtaaaacgtcggaaggttaagtgtgaccatcgggtagcttacccagccgctctgacgtttatagcctgtatcctcagccaatttgttggacagaaggaactccatggcatcaggattgttgttgatgtccacgaatgccctgtcaggcagtgagaatgccgccttatcttccaggttaaccgtcaggaccgtgtatatctcatgggtcacgggatctttcagagacaatgccggccagccgttatggtatatttcaatcacgattgagagacggctttcctgatacaggaaagtctcttccatggacggatggtcgcatttgataatttcaaaatcatcctcccctttggtaaatgtcaccatcggataggatacatcgacaaaacattcctcttcccggtaacagagatgttcttttccctctgaacggattatagccaatcgggtgttcatattcgtaactggttttaaaattattgacttgcaagttaattggtcggaattcacctgcttgtttctttaaacgtgtgattgtcaccgcctgcggacatttgggagagttgctgtctcaccgccttgattttcccgatcagttcgtcctcccttcggaatgagggggtacatttggtacgcctcatcccggctccccaggggatgccgccgcatacttttctcaggcgtgccttttcgctttccaaggccgactccagacgggccaacctgcgtcgcaacgattcttcggtcacagttctcatgatctcattgtttttttagtatggtgacggatcggaaagacagtcaccataccgtcgttatgtgtcacgttatattttagctttttcccttttgatgcctctcaggacgtacaacaggtgtaggaacagctccctgtcgtaaatccggaagaagaacggctcgcctgtttccctgaccgttccggtaaacgacacggactcccggttcacgggatattggaagaagttgccgtttgccagcagggtgtgctttttcttcatcacttcgcctaggaacctgtccatatcgtcgtttccctcatagccggagaagtagaggaaatgatgacggcgcaggcttcgcaggattttggcggtttccagcctcacatccctgcctgacgattcgtccgttcctctcatcaggttgcagatgaactttttctcgccatttatgtcaagaaacagataaggaactataattatagaggcatgccgtgcgtggccggagatgaccatcggcttttctttctggatgtctcctttgaaggtaatgttccggtaatggttgtccatctgccgttccagctccttccttggcgtggtaacggagcggagtcccgtgaagtagcgtccgcccgcccggaaacagaaccggtagatgtccgcatgataaggctctcccaggaaaaagaaattccgggtatggcggatggggggcaagacatccatgtagtcgaaatatctttcttccgtaatctcactgaacggggcgcagagggattgcaggtggatgcgtatcattttgcggacggtatttccggacacggctgtgagacacgggttcttttccctgtctctcagttcctccagtgtctcatggtggtagtcgccgtgtattccgtcagacatggtggtcacgcagctgccgtcaaaactgcgtgaatcgactacgaatttcagtttgtcgttattcatggttcagatgttttgaaggttcaacactcttttggcggcactgagggcattggaggtgagctgccgttgccatgccttgtttttgggtgaccagcggaatccggaggatttcagttcctttcgtctgctgtcttcaggaatcctgtcaaacaggatctgaaggcggtcttccccatagttccatacaagtgtcccgccctcgaacggcacttccttgttttcccggctttgcatcgctttcagcttttcgcgcatccgttccgccagttccggcaattggaagaatttgtttctcggtgtgatgacgggtttcttcacccttgcgttatattcggaaatgaagtccacggccctacggacgatttccacttccccgtgattggccaaagtggataccttgttcaggatgctgctgacaaacagggcacggctatagccccggcattgtccggtatcaatcccgtggatggtatcggcactgctcttgatgtcgcgtttgagcgtctgccatgccttttcctgtttctcttcctccggtcgtgcggcttcctttttccgtctgacggtttcaagaacttttttccgccaattgcggaattcttcgtaacggttctgatagcttctgttcgttttttcctgcctgtagtaatcaaatccgctccgtcccgtcaccatcgggttggcacagcgggagaggaccgagagctgggcggacaacttctgccggtaggcggcgatgtatgtatcccgttcctcttccggcatgagttgcaggtcgttgtgcagcccctctccgtaaatcatgatgtccgtctcgccgcgaatctccggattgaaggaactccaggcgtatgcgtcgcaagcctgtttccacatatcatccaaataggcaggatgtttgaatgctacggcttcccagtctttgaagtccttggaatgcaattcattgtgatcttccggatttccgtacaggtgtacatagttgcccgttccatgatgctcctttctgaaatggaacggtacggggggatagtccgtaccttttttccggatcatcgtgaccctgtgtgcattctctatggtaaggtctgctacttgctcttcgcagacctttgctgttgtttcattcataatcattacttttttaaatgtcagccgtaaatcatttcttccagttcatcgtccgtcaacaggcggatctcttcgtccgaacaatagtaagcgatttcttcgtccaaatcgaatgctgtcggatcaaggcttctgatgccatccagcagttcctgttccagtctttctacggaaaccagatagttcccatctttgccttgcacttcccgtgcaggatagctcatttcccgataaaccaacatcgtcatttccggattggcttcctgctgtcctttgcttgtcgtctttctgttcatacctttatttttttaagtttgacatgatcggctccatggagccggattttcgttttcttacttgcctggctgtcttttgtcggggattgagcaaggcttggcaaaagaaaataccgcagcgaagcgaggatgattttcttttagccaaccagcccctgaaaggggccgccttgcgcaatcaacccgacaaatggctatatttgcaggtaagaaattgaaaggacggcaggatattgtgaattatagattacaaaaaaagccatccctagggggacggcttaatgactgaatttgtatacttattgtgcaagacgctccttcacgttgttcattgcttctttcaggctgctgttcatgacccgtgcataatgctgtgtcatacgtgtggaggcatggccgagcatgacggaaacatcttgaagaggcacattgttggcaagcgtgaccgtagtcccgaaagtgtgacgggcaacgtgcgtggtcagattcttcttaatgccgcagaaatcggctatttccttgagatagctgttcatcttctggttgcacatgacgggcaaacagcatcctttcttaatgcaggtcggatgttccttgtatttctccaatatggccaggggtacgggcagcaatggaatattgctgatggaagaagccttcctacggtgttccaatttgacccttccttttcttatccaccagtctccgagattgtcctgtaccagattctctttgttcagactggcaacatcggagaatgccagaccggtgaaacacgcgaagacaaagacatccctgaccagttcaagccgtggaatggtgaatttctttttcattacggtctgcaactcgtcataggtcaggaataccggatcggtctcgtcctgctccatcttgtaaccgtaaaagggattcttgcgcatccattcctttgccaatgccatattggtaaatttcttgaagcatttcatataacggactatcgtgttccggcacagtcccgcctccgttttcaggtagatgtcaaacgcacggatgaactccggtgtcagctcatggaaagtgacatcctcctttccgtaataagaggggatgagcagctgtaatttcttcaccacgttcttataccggttgatcgtgacgggagagtagtctatacccgccagtatttccatttccttgatgccttccctcatggtgccgagcagtgtacgcatttcggtgtctttcccgaaaacacgtttaagaatcagttttggggtaatcagggcctgttccaataccagttccttgtgtttttccaaggcgcgtgcgtgcagttcggcaatataggcgttcagtgccactgatgccctgtccctgcctttactgcatcctttggcggcgttccataagttcaggggtacgcttctttggatacgtacatcgtcatagtctccattgatggttatccgcatcaataccggtgcctcaccgtttttcaacaatttcgttttaagcacgaaaaacagaatgttcattgttccttgtttcatcacttttgttttttgaggtgttacattcaattgtttcgtcaaaaccggatggcatgaggacgtggagcgaaatgttaaattcggtggtttttttgagggacttgtggaaaagccataaaaatcccatttttctcaggttcgaattgccttttgtatcccgggttcgattccttttttttatcccgatgggaaataccgaatttttaaatttctttcactttttcgacttcatccggtcatgtgtgcaaaattactttttcacaccggagattggaattgtcaaacagctgaaaaacaatgaagtatggtgcgtatttatggctttttcaaaagccttaaaaaaagccactgaattggcgaaatccaacttcacaaatatgtagcggaatgcgtagtgagggtaaaaaaagaacccttgaactatctctaattcaagggttttcatgtgtgaaaagcatttatgtactttctttggtggtgccaccaggaatcgaaccggggacacaaggattttcagtcctttgctctaccaactgagctatggcaccgtaaggctaattcaactcagttgtttctcttttgcggttgcaaaggtagttaaagttttggattctgcaaggcttctataaataaaaaacactgataaaaagctactttgcttattatcagtgttgtatggaatgaaatatttttcagtatataactgagaaaatctatttatcttcttttagcggattccatccctgagccttcaattcaaattcttgtccgtcacgggtaatcaatgcgcaaccgagttcgggtttggtgatatgcccgatgaggcggattccctccatctgtgatactttctcatgatcggcgatggggacagtgaaaagcaattcataatcttcaccgccattcatggcacaagtggtcaggttcatgttgaattcttctgccatgacagccgtctgatagtcaataggaatatgttcctcatagacacggcatcccgtattactttgtttgcagatatgcattaattcggacgacagaccatcggagatgtccatcatggatgtggggacaatattggcagccgccagtttttcgatgatatctttacgggcttccggtttcaactggcgttccagtaagtattctttgccggtgaagtccggttggatatctttttcacccttcagtactgttttctcacgttccaggagttgcagacccatataggcagcgcccaagtcaccgctgacacagattaagtcagtgtctttggctccgttgcggtagaccactttgtctttatcggcatctccgatacaggtgatgctgatggcaagtcccgtaagagaagaggatgtatcgcctccgataatgtcaacatgatactgttggcatgccagacgaatgcctgaataaagctcttccatgtcctctacgctgaagcgtttggaaagagcgagcgatacggtgatctgccggggcgtaccgttcattgcatagatatcggagaaattgactacggccgatttatatcccagatgtttcagagggacataagtcaggtcgaaatgaacaccttccattaataagtcggttgttactaatagttgtttctccgaagggtaggagaggacggcggcatcatcacccactccgtatttggttgattcgttttctggtttaattccctcggtgaggcggtcgatcagaccgaactcgccgagagttgctatttcagttcgcataaatagagtttagtattaagcacggttgataagttcacgcatgatagtggtcattttaggttgagctgcgtccgctgccttctgaacttcttcatgcgatacttctacaatttttccttctactcccaagtcagtgatgacggagattccgaataccttgattccgcagtggttggctacgatcacttcgggaacggtagacataccgactgcatcggcacccagaatgtggaatagtttatattcagcaggagtctcgaaagtagggccttgcgtaccgatataaattccatgttgtaccttaatgcctttttcctgagcaatctcgtcagctttacgaatcagttccttatcatatgcttcgctcatatccgggaagcgtggaccataaggaatattcttgccacgaagcggatgttcggggaagtagttgatatgatcggtgataatcatcaggtcaccgatttcaaaagcttcgtttgtaccaccgctggcgttggatacaaacaatgttttgatacccagctcacgcattacacgtacagggaaagtcacttccttcatggaataaccttcataaaaatgaaaacgcccctgcattgccatgatgtctttattgcccaacttgccgaaaatcagtttaccgctatgaccttcgacagtagacaccgggaagttaggaatatccgaatactttatttcatacttctcggtgatctcgtctgccaaactgccaagtccggtgccaaggatgatggctgtttcaggactggtgtgcattttccctttcagaaaagctgctgtttcttgtattttctctaacatagccaataatgtgttggttaaatttatcttgttgattttgtaatatctcaatctcaatcggcaaggcgtaaataaacggtttcagttcctcgctcaataccggatgatgaatcaggcgggttgcatctttctcggtggtgacaatcagtttatgttcacctttcagttttccgaatcgttccttgatctgttgtatgtcccgatgactgaaatgatgatggtcgtcgaatgaaagcgaatcaatctgatcggtatacattttcaactcttcgagaataggcgcaggtgatgcaatgcccgttaccagcaaaatatccgtattcgttaaagcactcagcggtaactcattcactgtagaatcaatctctgaatttgctgatggaaataccggttgcagatttccataacgaaacgatgagaagtataactgctgataaggataaaggttcagtcgttttgtgataatattatagtcaatcggcttaatatcctgcggacactttgtgacaatgacgatttgtgcccggtttttaccgttgacagactcgcgcagacgacctgccggaagtaaagtatcgtcgcagaagaggcggtgataatccgtcagcaggatgcttagtcccggcttgacgtaacggtgctggaaagcatcatccagcaatacaacttcaatggacggttctttgatggatagtaattgttctatgccatggcagcggttctcatcgacagctagtgtgacagacgggaacttggtatgcatctggtaaggctcgtcaccgatgctgcgtgcagtactttggggagtggcaagcacatatcctcggctatgccttttatatccccggcttaatactgccacatgatagttatcacgaagcagctttatcagatattcggtgtgcggcgtctttcccgtgccgcctacagacaggttgccgatgcagatgacaggaacaccaaaactctttgaccggaggaatccccagtcaaagagtttgtttcttactgttaccactgccccgtaaatccatgagacagggtaaagccacttatgtatcttgataaagtgttcgtccatgcagtacagtttacttgatatttagttcaaacggaatgcgtgcctgaatcatggaacgctcttttaaatttttcagcataccgaattgttgataatactctcctaacttgcttttcaatatttgtgattccacataattagtgggtttcgtattgagcagtgaagaaaggaggtcttgttttgccggataagaaacaactgtatatccttcgattcctgctttcctgacagcaatctccaaagctgtatcaatacctccgagtacgtctaccagtccaagttctttagcagcttctcctgtccatacacgaccttcagctattttctcaatggcctctttgctcatatggcgcccctcagcgcagcgattgacgaatgtatcataaccttgggtaatcatcatctgcatcagtgtcttctcatcctgattgaaaggacgcatgatatttccaaaatctgaaaatttatttgtttttaccacatcgtaggtcaaaccgatcttttctgataattccttaacattcggtaccataccgaaaattccgatggatcccgtcaatgtagtcggctctgcaacgattgtatcggctacacaagagatataataaccacctgatgcggcataatcacccatagaaacaattactggtttctctgttttcagttctttcacggcatgccagatttgttcggatgcaaaagcacttccacccggtgaattaacacggagaacgacagcttttacatcctcgtcatcttttagcttacgcaagtcacgaataacttttgtgcctacaattccctcttcagaagttgaagaaccgctgtaatctgtgatttctccggaggcataatagaccgctacgatgttaccgcttttatctttcggcatgttttttttcacattgatcatgtcactcaaccctagcaccggaaggcggtcatcttctttcaagtccacccactgtttaagataattgcgaacatcattgcggtaaatcaatgtgtccgccaagccacattgcacactttcctctgccggataaaacatcagcatacggtcagctaaagcattcagtgaatctacggggaggctgcgggaagcagataccccttcggtaacctgtccccaaatcgagttgataaaagctgtcacctgttcacgattggcaggactcatttctgtagaaataaacggttctacggcggatttataagtacctactttaaatatctgcatttctaccccgatcttttgcagtaagtctttataaaacagaggagcggaagcgatgcctttccactcaatcattcctttcggattgagcaataccttgtccgctacactggaaagataataaagtccttgtgtatagctatctccgtaggctatgatgaactttccgctttctttaaagtcgagcaatgcgttacggatttcctgcaaagatgcatacgaagttccgagcatacttgcctgcagataaattcctttgatattttcattttcttttgcttttttgatggaagaaagaatatcgtccagcccgtatgtattggagtcgtcgctgaacaactgtgataagatacctaacggactctcctgagtgcgttcgactaatacaccgttcaggtcgagcatcatcacagaattctttttcactattgtttctgtatccgcggttgatacaatgccgaacaatgttaccatgccgataataaataatacaatgcttgacaggatgataccggtcacagtggcgagcgtaaatttcaagaaatctttcattatactattgtttttttgagtcagcttgttttaaagctaacaaagataaataattgagttgatatttattcaataagtcgtgcgaatttttgttttgtcacaatgaatcaggtttatttgcttttagaatgctgcccggaacagggtagatataaattttgaatgatcggacttggggaccatttttctattgtattttagtgtagcattgagaattattctctaaatttgtagcattaacttaacattatgattatcatgaaaagaaaatcccctgtgatggccgttgctttggcgggactgtttatgtacacttcctgttctccgacggagcaagcggaaacgaaagattacacccagtatgtgaatacctttattggtgctgctgacaatgggcatacattccccggagcttgctatcctttcggaatgatacagaccagtccggtgacgggtgcagtaggttggagatattgttcggaatatacttatcaggactctctgatctggggcttcactcagactcatctgaacggaaccggatgtatggatttgggggatattctggtgatgccggttaccggtacccgtgcccgtgcatgggatgcttaccgcagccatttcccgaaagacaaggaagctgctactccgggatattatacagtcgaattatccgatccgcaggtaaaggcggaactgactgcttctatccatgcagctcttcatcgttatacatatcataaagcagattcagcttctctgctgattgacttgcagcacggacctgcctggagagaagaacaatatcattcacaagtgaatagttgcgaagtgaactgggaagatgctcagacgctgaccggacacgtgaataacacggtctgggttgatcaggactacttctttgtgatgaagtttaatcgtccggtaatagattcgctttaccttccgatgggagaaactgagaaaggaaagcgaatcattgctactttcgacttgaagccgggagatgaactgatgatgaaggtggccctttcgactaccagcgtagagggagcaaagaagaacttgcaggctgaaataccagactggaactttgacggtgtgaagctggctgcccatgacgaatggaacagctatctgagtcgcatggacgtagagggtacggatgatgaaaagacgaatttctatacttgtttttatcacgcactgattcagcctaaccagatttcagacgtagacggtatgtatcgtaatgctgccgattcgattgtgaaggccggaacaggaacattctattcaaccttctctttatgggatacttatcgtgccgctcatccattctatacattaatggttcccgaacgtgtggatgattttgttaattcattgatagaacaaggtgaagtacaaggcttcctgcctatttgggcattgtggggaaaagaaaacttctgtatgatcggcaatcatggtgtatctgttattgctgaagcctaccgaaaaggtttccgtggttttgatgcggaacgtgctttcaatatggtgaagaagacacagactgtatctcatccgttgaagtccgactgggaagtgtatacgaaatacggatatttcccgacagatctgacaaaagcggaatccgtctcttcaactctggaatcggtatatgacgattatgcggcagctgacatggcccgtcgcatgggaaaagaagaagatgctgcttactttgcgaaacgtgcggattattataagaacttattcgattcacagacgaattttatgcgtccgcgtaaagctgacggaacttggaaatctccgtttaatcctagtgatgtagggcatgcggaaagtacaggcggtgactatacggaaggaaatgcatggcagtatacctggcatgtgcaacacgatgttcccggtttgattgctctcttcggtggagaagaacctttcctgaataagctggattccctgtttacagtgaaactggaaacaactcaggctgatgtgacaggtttgatcggacagtatgcgcatggtaatgagcccagtcatcatgttacttatttatatgctttggcaggtcgtccggaacgtacacaggaactaatccgtgaaatctttgatactcaatataagaacaagcctgacggactttgtggtaatgatgactgtggtcagatgtccgcatggtatatgttcagtgcaatgggtttctatccggtagatccggtaagcggtgattatgtattcggagctcctcagttaccgaagattgtgctacatctggctgatggaaagacctttactgtgatcgctgaaaacttatcgaaggaacataaatatgtggatagtatcacgctgaatggcgaaccttatacaaagaatacgatttctcatgaagatattctgaaaggtggtacactcgtatataagatgaaatagactgtatacagagtagtatacagaagatccctccaaagttttttctttggagggatttttggctttatatgctttaaattcgaataattctctaaatttgtgctattaatctgactggtacattcatggagaatactgaaactttaatagtggagcaactgaagataggcaatgaaaatgcttatcgttacatatatgatcatcattatgccttgctctgttatgtcgccaatggttatctaaaagatcagttcctttccgaaaccattgtaggagatactatctttcatttatgggagatacgtgagactttggatatttcagtctctatccgtagttacctgctgagagctgtccgtaatcgttgcattaactatcttaattcggaacgtgaaaagagagaaatagcattttctgctcttatgcccgatgagataacggatgataaaatcatactgtccgattcgcatccgttaggtattttactggaacgtgaacttgaaaacgaaatatataaggctatcgataaattgccggacgaatgccgtcgggtttttgctaaaagtcgctttgaaggaaaatcatacgaagaaatttccggtgaactgggaatatctattaatacagttaagtatcatataaagaatgctttagcttctttacacgctcatttgagtaagtacctgatttctctattactattttttttcaggtaaagcgaaaaaaaatcattttctgactacccttaattaaaaaacaactgtctcctttatagaaagcataaatatggaagaagaaaataaacatattgatgaactgattgccaactatctgactgaaggtctggataagaacgctttagatgaactaaaaacatggattgccgcatcggctgaaaatcagcaatattttatccgtcagcgggagatctggttttcagctgtaagtcgtgaagccgcatctgtctatgataaggataaagcgtttgagaattttagaaaccgtgtcgaaagtcagaaggaaattcagagcacttcccgtcgaggttttagcctgtcagcgttgtggcgttatgctgcggttgttgcaatcataatagcggtgggatgtatttcttattggcagggagaggtgaatgtgaaagatacttttgcagatatttcagtagaagcccctttaggatcaaaaacaaaactttatttgccggatggcacattggtctggcttaatgccggttcacgcatgacatactcgcaggggtttggtgtcgataaccgaaaagtagaactggaaggggaaggatattttgaggtaaagcggaatgagaagattccctttttcgtaaagactaaagatctgcaattacaggtgttgggaacaaaattcaatttccgtgactatccggaagatcatgaagtggtcgtttctttgttggaaggtaaggtcggattgaacaacttgttgagagaagaaaaagaagctgtcctttcacctgatgaaagggccgtattaaataaggcgaacgggcttttgactgtagagtcggttaccgcatccaatgcgtctcagtggacggacggttacttgttttttgatgaagaactcttgccggatatcgctaaagaactggaacgcagctataatgtaaagattcacatagccaatgattccttaaaaacattccgcttctatggcaacttcgttcgtcgcgaacaaaatatccaggaagtactggaagcactggcttctacggaaaaaatgcaatataagattgaagaacgtaatataactatctattaaccggttaccagagattataatgctatgattgtttaaccttaaaaaatgaaaagtatgaataaagagaaaaatacagaataatctttagctgacaaataaggagagacaaataaaaaaccggaagatttcggacatctcccggctccttgaatctcttctttcaacaatcatctagtgtgaatatgttttcaaaagagaatgtgcaaagttagcaaaatacatctcttttaaaacgagttattcaagttttaattaataatttgtttattttatgaattacaggaagaaggccatattaatggtcatggctctgttttgccttaacatagcaatactagcccaggctgtttcattgaaaatggataacgtttcagtgaaagaagcaatgacccagttgaagaataaaagcggatattctttcgtttataaagtcggagatctggatacaaagaagattataactgtaaaggcgaaagagctgaatgaggctatcgatcagatattgtacggacaagacgttgtctatgaagtgaaagggaagaatgtaattgttcagaaaggacaagccaggcagaaaacctcaaaggatggtaaaaaacgtaagatcacaggtgtggtgaacgatgttaacggcgagcctattatcggtgttaccatcaaggagaaagggacaactaacggaacggtatcggatataaatgcgaagtttacgttggaagtatcgccgggagcggtattggaactatcttacatcggttatcagcctctggaagtgaaagttggaaatcagacagatttatccatcgttttgtatgaaaagcaagaattgctggatgaagttgtggtagtgggatacggtacaatgaagaaaagtgacttgaatgcttcgattgtttctgtaaagtctgagaaactcaataaagcagcttcaccgaacttctctgaaatgttgatgggacgtgcggcaggacttactgtaaaacaggggagtgcacagcccggtggtggtattgaagttctgattcggggtgcggcttctaccggtgcggggaatgatccgctgtatgtggtcgatggtttccccatagtgaatgccggtgtcaatccgggaagcggtaatcagtggacggcaggaagcaacagccctttgagcagtattaaccctaacgatatcgaatccatagagattttgaaggacgcttcggcaactgccatttatggtgcgcggggtgctaatggagttgttctgattacgacaaaaagaggtactcaggatacgaaagtagagtataacatgaatatgtcgtttcagactataaataaacgaccggaattattgacggccggagagttaatgactactcagaacagttactataaagaacagtatttaatgcagaatctggtatatccttatgggaatacagatccgggtgctgtcagcccttatgtgcctatgtacacggatgaagaaatagcaaaagccggaaaagggaccaactggtatgatatgattacccgtacaggtcttatccagcaacataacctcacagtgacttatggtaatgaaaagatgagatcattgatttcgctgaactacttcgatcagaaaggagtggtgaaaacatccggttataaacgctatagcttccgttataatctggaccataaaataacgaaatggtgggattatggtatttctgccacagcctcttatgtagtcgatcagaatgcgacactggggggaggatatgacagtacggcaggtattattgaatcggcgttaagttatagtccgacagtgaaggcggaacgagacccgacgaccggcaaatggatggaagatcctaagcaggcattgctcaatcatcctttgtcttatctcgacattgaggatgagacaaagaccaagcgttttctggcaacagcattcactaatttctattttataaaagatgtgttctggttgaaactgtctgccggtgcggatatccgcgacgggtcccgccatagctactatccgatgactacgaaatatggaagtagtgtgaatggagatgcgaatatcaattccgccaaccgtgaagactatgtggcagatatggttttcaattttcagaagactttcaaggagagacataaacttcttgcattgctgggatattcgtatcaggtgcagaatgatgacggagcgtatgcacgtgctatgggatttatgtctgatgcgttgatgtattataaactacaggcaggtgaaacgcgcccggtggtcagttcttataaaaataaacacgtgttggcttcttatttcgggcgagctcaatattctttcaaagacaagtatctgtttacttttactgcccgtatcgatggtagcgaccgttttggaaagaacaaccgttatgctttctttccttcgggagcatttgcgtggagaatgaatcaggaagattttctgaaagatgtcaactggctctccgatgccaagttgcgtgtcagcatgggacaggtgggtaatgaaaatctgcctaacgatgctgcttccgagtactttgcctttgacggcagaaattattatctgggagatacagaaaagagaggagtaaatctgggaaagttcggtaatcctgatttaaagtgggaaaccactacagaagttaacttcggactggatttcggtttcttccggaatcgtatcaatggtagtgtagatgttttctttaaagaggtaaaagacctgctgagctggcgttcgttgccgcatacagctgtcactaccggtatatggtccaacattggaaaaacaaaaagtaccggttttgaactgacgctgaacacagtgaacctggaaggaccgttacattgggaatcgacattgacgtatacttcctatcgtgacagatggaaagaacgtgatccgaaagtaatcctggctccttatgtcaaagaagacgatccggtaagtgctatctatacgctgattccggacggtataaagcaggccggtgaagatacgccggctatgccggatttgttaccgggacagcgcaaatataaagatgtgaacggactcgacgaggaagggaatctgacaggaaagcctgatgggaaaatagatcaggcagatgtcgtatatctggggacacgtgcaccgaagtttactatgggattctcgaatgatttccggtacaaaggatttgatctgaatatttatctttatgcttcggttggcggatattcctatccttacactcaggtagaacacggggtgtatggtggaaacggcatccagaggctgaaagacaataataactttctggcggatataaaaaatcgttggacttccgataacatgagttccgctatgcctagtggcgaagtgaacagctatgatagctacggtgctccgaactgggagaagaatacatatttacgtctgaagaacgtaacgttgggatatgatttgagcagactgtttaaagctgataagttgaaagtaagattttacttttccggtcagaatctgctgacgtttaccggatataaaggactcgatccggaagttgaaaacgaccgggcgtcatatcctcaacagaagactttttcatttggacttgatgtgaaattttaaactggaatgtcatgaagaaattagctaaaaaactattattactatttataagcattcagtttgtagcctgtgaggggagcttggaacctcacttgtatggagttgtagatactggaaatgcgtttaatactcctgcagacctttcggctgcaacggttgccctttattatgaattacgccaaaaaggctggggaccttatttgttttgtgatggaagttcttttgtaatggatgaagtttcaaccgaagaatggactaccaagtggtcttgggttgcttttctgaatggttcgtggacggatgctgaccagatggtgaaaggattctataactggactgcccctaatatcactcgttgcacttatacgatagcgaagatggaagagtctccggtagctcagtcggtgaaagacttgtatattgcggaggtccgggcgctcagagcctttttcatgttcgatttatatcggctttatggtcctatgccaatgattctggaagccgaccaggcaatcaatccggatccggattataaaccttacagacctacgtctgaagaagtcggaactttcctgacgacagaactgcgtgctgctgccgacgcacttccggtagaacaagctgaatatggacgcatcacaaaaggagctgccctgcattatttactgaaatattatatgcatgaaaagcagtggcagaatgctctcgaaacggcaaatgagattatcggtctgaattactatgaactggagaaggattatgcaagtatattttcagctcagaacgaaggtaataaagaactgatgtttgttgtgagagctgaaccactggcagattatggtaatcatacatatgcaaatattttgccgggtgactacgcttcaccttatggaaacatcgtagaaggatggtccggacaccggatgccgtgggaattctatgatacgtttgatgaaaatgaccggcgaagagctttggcacaggccgaatatacatcaaagtccggtgctacagttgatttgagagccagtggtgatgtaggcgctttgcctttgaaatatgggattgatcctgaagctacaggtacatgggcaggcaatgataaggtactcgaccgatatgcggaagtgttgttatttaaggcggaagcattgaatgaactgaatggtcctaatcagggaagtgtcgatctgattaatgatatccggaaacgtgcttttggctttggcacctctctgcctgcaatacccgtttttaaagagagctttgacggagagtttgttgacaatgttatagggatattctcgatgaataactacgatcaggccggtggatctgcctggaagtatgatgtggataaaaacaacacgttgaataacggaaacagcttacgtgtggaagttgaatcttcgggtacggaattctggactttgcagatgcgaacagagcctttggttgcaaaagggcgtaagtattcaataaagatgaagttgaaagcctcgaaagacattcagtttgaaatacgcgttgaaggaccattgagccacatggaatccatctctttgaaagcaggcgaagtaaaggaattctccacacagacaggtaaagctacggaagatcaaaattgtgctctgttccttgctttgggaaattccggaagcggatatgaactctggattgatgaaatagagtttacagcgatggaacaggctgctgatggtggagatgctatcataaagcaattatccgatttcccggataaggagtcgttgagagactggattctgaaagaaagaggctgggagttctggtatgaaggaaagcgcagggaagatttgatccggatggggaaatatatagaaaccggtaagaagtatagtactaatttctcggagaagaatcttttgttcccgattcctacatcggtcattatcgaaaattctcatatcgagcagaatcctcattattgatcataaacaatttatttatcagttttcaataggtattttattaaataatcattgatatatgaaaaagttaaagcattctattctttcgctcttgttattgatgggagcgtgtattgtcagttgtagtaatgatgatggacagacttcctccaccgatccggatgaagtggggggagaaagtttcacgattcctgtatcgagtttgcgtttgcgggacccgtttattctggtcgacaagaaaacttcgatgtattatcttcatttcaataataacttgaaaatcagagtttataaaagtaaagacctgtccacgtggaaagacgaaggctattcttttatagctaaaagtgatttctgggggcaacaggacttttgggcaccggatgtgtatgaatatgaaggacgttattatttatttactacattcagtaatgcgggagtgaagcggggaacttctattctagtttccgatagtccgaaaggccctttcactccacttgtaaacaaggcgattactccttccggctggatgtgtctggatggatctttgtatattgacaaagaaggaaatccctggctgttgttctgtcgtgagtggctggaggctatcgacggtgaaatttatgcccaacggctggcgaaagatctgaaaacgacagaaggtgatccgtatctgttgttcaaggcttcggaagctccctgggtaggctctattacaagttccggggtgacgggcaatgttacggatgctccttttatctatcgtctggatgatggaaaactgattatgctatggtccagtttccgaaagacagatggaaaatatgctatcgggcaggctgtctcggcatcgggtaatgttcttggtccttgggtgcaggagcccgaaacgctaaatagtgacgatggcggacacgcgatggtattcaaggatcttaaaggcaggctgatgatttcttatcatgcaccgaattcgcagacggaacatccggtgataacacctatttatattaaggatggaaaatttgtagctctgaattaatgtggctttttctttctgaaccgtctattgtatatagattcagttgacagaaataaataatctattttgcgggtatatgtctcattatttagaaggaagtgttaactttggcgaaatagattctgttgaccgatgttgccgttattgtatagaaggtaaagtcagaaaagtaaataaataatttgaagagcttatgaaaataagaaatctggtgtttggtgccctttgtggcattacattcttttcctgttcggagtctggtgggggaaaagaggtagagatggatcgctttgtcacggacctgatgggtaaaatgacgatccgtgagaagctgggacagttgaaccttccttccggtggcgacttggtgacaggctcggtgatgaatagtgagcttagtgatatgattcgcaaagaagagatcggtggctttttcaatgtaaaaggaatcaaaaaaatctatgacctgcaacggctggcagtggaagaaacccggttgaaaattcccttgatagtcggggcggacgtcatacatggttatgaaacgattttcccgataccgttggccctctcatgcagttgggatacgttggctattcagcggatggcgcggatttctgccattgaagccagtgcggatggcatttgctggacattcagcccgatggtagatatctgccgggatgcccgttggggacgtattgccgaaggaagcggtgaggacccttatctgggttcactgttggcaaaggcctatgtgcacggttatcaaggtgacagtatgcagggaaaagatgaaatcctttcttgtgtaaaacatttcgccctctatggagcatcagaagccggtaaggattataatacggtcgatatgagccatctgcgtatgtataacgaatattttgctccttatcgggcggcggttgaggctggtgtcggtagtgtgatgagttcttttaatatagtagacggcataccggctacggcaaataaatggctgttgacagacgtgcttcgtgacgaatggggatttcagggacttctggtcacagactacaattccattgctgaaatgtccatccatggtgtggctcctttgaaggaagcttctgtccgtgctttgcaggcggggacggatatggacatggtttcctgcggctttctcaatacgctggaagaatcgctgaaagaggggaaagtcaccgaagcacagattgatgcagcttgccgtcgtgtactggaggctaagtataaactgggcttgtttgccgatccatataaatattgcgatacgttgcgtgcggaaaaagaactttatacgcctgagcaccgtgcagttgcacgcgaggttgcggcagagacgtttgttctactgaaaaatgagaatcacctgcttccgttggaggaaaaagggaaaattgccttaatcggtccgatggcagatgcacgcaataatatgtgcggaatgtggagcatgacctgtactccgtccggacacggtacgttactcgaaggaatccggtcggcagtaggagacaaggctgaaatactttatgccaaaggcagcaatgtatattatgatgcggaaatggaaaaaggagctgtcggcatccgtccgttggaacgtggtaatgatcagcaactgctggccgaggcattacgtacggccgcccgtgctgatgtgattgtggctgctgtgggtgaatgtgcggaaatgagtggtgaatctccttcccgtactaatctggaaatccctgacgctcagcaggatttattgaaagcattggtgaaaacaggtaagcctgtggtactgctcctcttcactggtcgtcctttggtcttgaactgggaaagcgaacacattccttctattctgaatgtatggttcggaggtagtgagacaggggatgccgttgccgatgttctgtttggcaaagccgtcccgtgcggtaagctgactactaccttccctcgttcggtagggcaacttcctttattctacaatcatttgaacaccggacgtccggacccggacaaccgtgttttcaaccggtatgccagcaactatctggatgagagtaacgaacccctttatcccttcggctacggtttgagctataccgactttgtatatggcgacctgcagctcagttcggaaaccttgccgaaaaatggaaacctgacagcttccgttaccgtcaccaacaatgggaaccatgacggctatgaaacggtacaactctatttgcgtgatatctatgcggaagtagcgcgtccggtgaaagagctgaaaggcttcgaccgtatcttcctgaaaaaaggagagagccgtgaagtgaagtttgtacttacggaagatgacctgaaattttataattccgggctgcaatatatctacgaaccgggagagtttgatgtgatgataggtacgaacagtcgtgatgtacagacaaagcgctttattgcggaataattattttgaaatctaatatattagttacaaccatgaaaaaacttacatttttattattatgtgtcttgtgtacgctttcgttgcaagctcagaagcaatttacactagcctcacctgatggaaatctgaaaacgacaataaccattggcgaccggctgacttatgacattacatgcaacggcaggcagattctgaccccttctcccatatcaatgacgttggataacgggactgtctggggagaaaatgcgaaattatccggaacttccaggaagagtgtggacgagatgataccatctcctttctaccgtgccagcgaattgagaaatcattataatggactgaccttgcgtttcaaaaaagactggaatgtagagtttcgtgcatacaatgacggtatcgcctaccgttttgtgaatcaggggaagaagccttttcatgtggtgacggaagtatctgattattgttttccatcggatatgactgcctccgtgccttatgtaaaaagcggtaaagacggtgattataactcccagttttttaattctttcgagaatacgtatacaacggacaaactgtcgaagctgaataaacagcgcttgatgttcttgccgttggtagtagatgcgggcgatggagtgaaagtctgtatcacagagtccgatctggaaaattatccgggactttatctttctgcttcggaaggcgcgaatcgtctgagcagtatgcatgctccttatccgaagcgtacggtacagggtggtcacaaccagcttcagatgttggtgaaggagcatgaagactatattgccaaagtggataagccgagaaacttcccctggcgtatagccgtggttactaccaccgataaggaccttgccgctaccaatctcagctacctgttaggtgcgccttcacgtatgtccgatctttcatggattaaaccgggaaaggttgcttgggactggtggaatgactggaatctggatggcgttgattttgtgaccggagtaaataatccgacttataaggcatatatagactttgcttctgcaaacggtatcgagtatgtgatacttgacgagggatgggcagtgaacttacaggcggatttgatgcaggttgtcaaggagattgacctgaaagaactggtagattacgcagcttctaaaaatgtaggtatcatcctttgggccggttatcatgcattcgagcgtgatatggaaaatgtgtgccgtcattatgccgaaatgggagtaaagggtttcaaagtggactttatggaccgtgacgatcaggaaatgactgcattcaactatcgtgccgctgaaatgtgtgctaaatacaagctgattctcgaccttcacggcactcataagcctgccggattgaaccgtacttatccgaatgtgttgaatttcgaaggagtcaatgggttggagcagatgaaatggagttcaccgtcagtagatcaggtgaagtatgatgtgatgattcctttcatccgtcaggtttccggtccgatggattatacgcagggggcgatgaggaatgcttccaagggtaactattatccttgttattcagaaccgatgagtcagggaacccgttgccgccaactagccttgtacgtggtgtttgaatctccttttaatatgttgtgcgatactccgagcaactatatgcgcgaaccggaatcaacggcatttatcgcagaaataccaactgtatgggatgaaagtatcgttcttgacggtaaaatgggagagtatattgtgacagcacgccggaaaggggatgtctggtatgtaggtggaattacagattggagtgcacgtgatattgaagtcgattgttctttcctgggtgataaatcttatcatgctactttgtttaaagatggtgtgaatgctcatcgggcaggtcgtgattataagtgtgagtccttcccgataaagaaggacggtaaactgaaagttcatctggcaccgggaggaggttttgcccttaagataaaataattattttagagttgaaactatgttttttatcgtcacccgtcactttttagaataaagtattaatatatagaccaatagcggtgacggcaaatgctgatggctaagtgacggcaagagttttacgctttttgccgtcactttttgtgttgtaaactgattcttggtctagcatattattctcctagagataatcaggctccccacgtaatttgaatgcgtttttgctctcatgccctaacagattgtctgtatgcctttattcatcgtagtttcaggtatggcagcaattgtggtagcagttatgagagcaagtgtttgctctcactcttccatgtatcattatctgtcatttgtttgatgttgtcatttgatttacagtgtgttaatgtctgaggtgtcaattcttaacgattgatatttcagacattaataattgataaatcatcctttaatagttgataactccgctgtttttgagtgataagtgatttattgtttcttggaagagtaggttaatcgaacagttggtgcggtcaagttaattgaatcatataagtaaggcatcagtttcctgccttgtttcattcattccataggctggaaccactgttttcaagcgtccgaaactttggtttcacggctttggaactaaagtttcaagccgatgaaactttagttccaagcaggagaaacaaaagtttcaagcgggagaaactaaaaagctctgtatagaccaaccaacagcccataagtaaccattgaagacaaggcagtgtgacagcaaaatttgccgtcacactgccatcacctacttctgtcacctcattaattattcatattcaagcaattacatccgacaacgtgacagatgacagcaaattatagttttttattttcatagagagcctggctgacacgtaagtaggggttaactgaaaagtcggtagtatctccattctcctccttcgggaaggaggatatttaagatactattgactttttagtcagtccccctaagaatgttaatcgaattgttgcggatggcagagttttttctttttccaagagtgtagaactttaaaagactcctgtctctacccttttttcgtattttcctcccttgctacgatttccccttcttcctgccttcttccttttcagtctttcaatccccttttcctccgtccttttttccttttctttggattcccgttctggtttcctttgcgcatcttcttcacctttcctgtatttcctcttcatttccctggtgcatacgcccgtgtcctcgcccttctaacgcgcgtgtgaatataataaggtgtacccctttccgcctttcctcctgtatccgagaaaaacatgttctacaacatccttataattcaacactttagcttctatcctcaaaaataattcaaaaaaagagtgatttaagtttggagtatatttgaaaagggcgtacttttgcacccgctttccaagagaagaaagccttgttaaattgacttagtgtaaaagcgcagtactgcttgaccataagaacaaaaaaaacttccgataaagtttggaagataaagctaaaagttcttatctttgcagtccgattcgcaaagaaaaggcgttttgtttttcttctttaccttctttccctttcgctaagagagtctgagaaacgatagaaaaagaaaagcgaaaaaaacttccgaaaacatttggtagttaaaataaaacctcttacctttgcacccgcttttaaaacgaaagcagcaagttctttgaaatattgataaacaatacaagtagtacaagaaaaaaatagaaccgtcaatacttgtcttatatatattaatatgtgtgagacgtaaggtattaatgaagtcaataaattgtacggcatcctgaacagagcaaaaatcagctttatgctgactaacaatacttttacaatgaagagtttgatcctggctcaggatgaacgctagctacaggcttaacacatgcaagtcgaggggcagcatttcagtttgcttgcaaactggagatggcgaccggcgcacgggtgagtaacacgtatccaacctgccgataactcggggatagcctttcgaaagaaagattaatacccgatggtataattagaccgcatggtcttgttattaaagaatttcggttatcgatggggatgcgttccattaggcagttggtgaggtaacggctcaccaaaccttcgatggataggggttctgagaggaaggtcccccacattggaactgagacacggtccaaactcctacgggaggcagcagtgaggaatattggtcaatgggcgcaggcctgaaccagccaagtagcgtgaaggatgactgccctatgggttgtaaacttcttttatatgggaataaagttttccacgtgtggaattttgtatgtaccatatgaataaggatcggctaactccgtgccagcagccgcggtaatacggaggatccgagcgttatccggatttattgggtttaaagggagcgtaggtggacagttaagtcagttgtgaaagtttgcggctcaaccgtaaaattgcagttgatactggctgtcttgagtacagtagaggtgggcggaattcgtggtgtagcggtgaaatgcttagatatcacgaagaactccgattgcgaaggcagctcactggactgcaactgacactgatgctcgaaagtgtgggtatcaaacaggattagataccctggtagtccacacagtaaacgatgaatactcgctgtttgcgatatacagtaagcggccaagcgaaagcattaagtattccacctggggagtacgccggcaacggtgaaactcaaaggaattgacgggggcccgcacaagcggaggaacatgtggtttaattcgatgatacgcgaggaaccttacccgggcttaaattgcatttgaatatattggaaacagtatagccgtaaggcaaatgtgaaggtgctgcatggttgtcgtcagctcgtgccgtgaggtgtcggcttaagtgccataacgagcgcaacccttatctttagttactaacaggtcatgctgaggactctagagagactgccgtcgtaagatgtgaggaaggtggggatgacgtcaaatcagcacggcccttacgtccggggctacacacgtgttacaatggggggtacagaaggcagctacctggtgacaggatgctaatcccaaaagcctctctcagttcggatcgaagtctgcaacccgacttcgtgaagctggattcgctagtaatcgcgcatcagccatggcgcggtgaatacgttcccgggccttgtacacaccgcccgtcaagccatgaaagccgggggtacctgaagtacgtaaccgcaaggagcgtcctagggtaaaactggtaattggggctaagtcgtaacaaggtagccgtaccggaaggtgcggctggaacacctcctttctggagcgatgtcgtaacaacgatttcataggttctattattgtactactggtacttgtttatttataacatatagatcaaccatctatagaagtatagatagagataaacaagagaaataaagaagccgagtctaacatcaggtagacaaggttgaactagtcctatagctcagttggttagagcgctacactgataatgtagaggtcggcagttcaactctgcctgggactactccgaacaaaaattgtcgttgccaatacattattgcgatgttcaattactcttgggggattagctcagctggctagagcatctgccttgcacgcagagggtcaacggttcgaatccgttattctccaccatctctgaaaacagagaaacgatctttgacatgatgtacaaaaagtaaaatttagtaaagagctaaaagtatatatcgaaccgtacgttttaagtaccgcgatattgagtacccgggtttaatacctgatacttgatacctgatacttaaaggtaagtttgaaagaaagtaagcaagggcgcatggcggatgccttggctctcggaggcgatgaaggacgtgataagctgcgataagctctgggtaggtgcaaataacctttgatccagagatttccgaatgggacaacccggcattctgaaggaatgtcatccatctttgatggaagctaacgcagggaactgaaacatcttagtacctgtaggaaaagaaaataataatgattcccctagtagtggcgagcgaacggggaatagcccaaaccacccatgttacggcatgtgtggggttgtaggaccacgatgtcgcaagacatttgacgagtagaatcctctggaaagtggaaccatagacggtgatagtccggtatacgaagtcaaattaagcgtagtggtatcctgagtagcgcgggacacgagaaatcttgcgtgaatctgccgggaccatccggtaaggctaaatactcccgagagaccgatagcgaaccagtactgtgaaggaaaggtgaaaagcacttcgaatagaagagtgaaatagtccctgaaaccgtgcgcctacaagcggtcggagctgcgtaagcagtgacggcgtgccttttgcataatgaacctacgagttactttttccggcaaggttaagcatcttgagatgtgcagccgaagcgaaagcgagtctgaacagggcgtcgagtcggaaggagtagacgcgaaaccaagtgatctacccttggtcaggttgaaggttaggtaacactaactggaggaccgaaccgataagcgttgaaaagcttccggatgaactgagggtgggggtgaaaggctaatcaaacttggagatagctcgtactccccgaaatgcatttaggtgcagccttgtgagttactaatgtgaggtagagcgactgataagatgcgagggcttcaccgcctatcaagtcttgataaactccgaatgcgcattagttctatcacaggagtgagggcatgggtgctaaggtccatgtcctaaaggagaagaatccagaccatcagctaaggtccccaaataaacactaagttgaactaacgaagtcagattgctaagacagctaggatgttggcttggaagcagccattcatttaaagagtgcgtaacagctcactagtcgaggagtttggcgtggataataatcgggcattaagtgttttaccgaagctatgggatcagtaatgatcggtaggggagcattccactctgcgtcgaaggtgaagcgtgagctttgctggagcgtgtggaaaagcaaatgtaggtataagtaacgataaagggggtgagaaaccccctcgccgaaagactaaggtttcctgatcaacgctaatcggatcagggttagtcgggtcctaaggctcagccgaacggtgaggccgatggcagaacaggttaatattcctgtactaccttaaggagtgacgtggagacggaggcgtgacagcgccgcggactgacggaatagtccgttgaagggtgtagatgttgattatcccaggcaaatccgggataagagtcgaacctgatagtatggagcgttcttcggaacaatccaatagtgcgtgtaatcatactcccaagaaaatccgctaaacttaatccttgaggtacccgtaccgcaaacggacacacgtagtcgggttgaatatactaaggcgcttgagtgattcacggttaaggaactaggcaaattgaccctgtaacttcgggataaagggtcccaacgagagttgggcgcagagaataggtccaggcaactgtttaacaaaaacacagggctgtgccaaattgaaagattacgtatacagcctgacacctgcccggtgctggaaggttaagaggagatgtcatcgcaagagaagcattgaattgaagccccagtaaacggcggccgtaactataacggtcctaaggtagcgaaattccttgtcgggtaagttccgacctgcacgaatggtgtaatgatctggacactgtctcaaccgtgagctcagtgaaattgtagtatcggtgaagatgccgattacccgcgatgggacgaaaagaccccgtgaacctttactatagcttaacattgaatttgggtaattgatgtgtaggataggccggagactttgaagcaggtacgccagtatttgtggagtcgctgttgaaatacggccctttgattatttgagttctaactcgtggtacgaggacactgtttggtgggtagtttgactggggtggtcgcctccaaaatagtaacggaggcttctaaaggtgccctcaggacgattggtaaccgtccgcagagtgtaatggcataagggcgcttgactgggagacttacaagtcgatcaggtaggaaactagagcatagtgatccggtgtttccgtatggaagggacatcgctcaaaggataaaaggtactccggggataacaggctgatccctcccaagagctcatatcgacggaggggtttggcacctcgatgtcggctcgtcacatcctggggctggagaaggtcccaagggttgggctgttcgcccattaaagtggcacgcgagctgggttcagaacgtcgtgagacagttcggtctctatctatcgtgggcgtatgaaatttgcgtggctctgacactagtacgagaggaccgtgttggactgaccgctggtttaccagttgtgccgccaggtgcattgctgggtatctaagtcgggattggataagtgctgaaagcatctaagtacgaagccagccacaagattagatttcttagggtcgttaaagacgatgacgttgataggatgcaggtgtaaaggtggtaacatcaaagccgagcattactaattgcccgttcactttctttcggacggtgcggatcgcgatatatacgtttagcttttttaattgacaattgacaaatgacaattgacaattagattaacagatacttgaattttactttttatcatgtcataacttatcatgacagctgcgataattgtcatttgtcaattgtccattgtcaattgaagaaattcaggtggttatagcacgagggttccacctcttcccattccgaacagagaagttaagcctcgtcacgccgatggtactgcgtaacagtgggagagtaggtagccgccatttttagagaagccccgccagtctttattgattggcggggatttcttgttttggcagtttaggaaaaaatagctatatttgccgacgacaattattttattaaacgtttaaagcaaattaaaaggtatgaaaacaaaactttttttggctgctgtagcagtaacattttctttcgctgtgatctcttgttctggtaacaaagctaataacgctgccgcttctgaaggtgaagaagcaacagttgaaactgtagaagctgttgctgttgaagcaactgactcttgctgccaggcgaaagactcttgtgctactgcttgcgataagaaagctgattgcacagaaaagaaggaatgctgtgataaaaagtaatctattgatttagaacgataaattaaaagggggtatagtgtgtccgcactatgccccctttttctgtttgatgaaatacggggctttattagtaatacttttctgctaataaccgactttaacttatgaaatgaaattattttcgataaaaaagtaacgtattatttggtagtacagaaataatccatacctttgcaccgtcaaactataaaagagacaaaaaatgaatcagatgtttatacatattctactatgcggtattattattctactatcaaaggttagtggaagtgagtgctgcgcgtaaatgtgtatactgaaaatatacgaaagcctttctcacttccaagtgtgaaaggtttttttttgagccaataataacataaaatgatagaagatggacaataggttatttatttttgataccacccttcgggatggtgaacaggttccgggatgccagttgaacacagtggagaagattcaggtagcgaaggcactcgaagctttgggggtcgatgtaattgaagccggcttccccatctccagcccgggagattttaattctgtgattgaaatttctaaagcggtgacttggcccactatttgtgctttgacccgtgctgttcagaaggatattgatgtagcggtagacgctttgaaattcgccaagcataaacgtatccatacaggtataggtacttctgactctcatattaaatataaattcaactccaatcgggaagagattatcgaacgcgcggtagcagcagtgaagtatgcacgtcgttttgtggatgatgtggaattttatgcagaggatgcaggacgtaccgacaatgaatatctggcacgtgtggtagaagcggttatcaaagcgggagccacagtggtgaatataccggatacaacgggttactgtctgccttccgaatatggtgcaaagattaaatatttgattgatcatgtagacggcattgataacgcgattctttctactcactgtcataacgatttgggaatggcaacagcaaatacgattgctggtgttctgaatggagcccgtcaggtagaggtgaccattaacggtatcggcgaacgtgctggaaataccgctctcgaagaaatcgcaatgattatcaagagtcatcatgagatcgatattcagaccaatatcaatacacagaagatttatccgaccagccgtatggtatccagtttgatgaatatgcctgtccagccgaataaagcaatcgtaggtcgcaatgcttttgcccattcatcgggtatccatcaggatggtgtgttgaagaatgtagaaacttacgagattatcgatccgcatgatgtaggcatcgatgataactctatcgtactgactgcccgtagcggacgtgcggcattgaagaatcgcctgtcgttgttgggagttaacctggatcaggaaaaactggataaggtatatgaggagtttctgaaactggccgataagaaaaaagatatcaatgatgatgatgtattggtattggcaggagcagaccgcagccagaatcatcgtattaagttggagtatttgcaggtgacaagtggtgtcggtgtacgttcggttgctagtctgggactgaatatttccggtgagaagtttgaagcttgtgcgagtggtaatggtccggtggatgctgccatcaaggctctgaaaaagatcgtagatcgtcacatgacattgaaagaattcactattcaggctattagcaagggaagtgatgatgtaggtaaggttcatatgcaggtggaatatgataatcagatttattatggcttcggagcaaatacggatattatagccgcatcggtagaagcttatattgactgtattaataaattcaaggcataaaggaacagcgaaagtggtattgaaatacgtaccctgcattaattataaatcatacatagtaaaaatagatataacagatgaatacattatttgataaaatatgggatgcccacgtggtgactacggtggaagatgggccgacacaactttatattgatcgtttatattgtcatgaagtgaccagtccgcaggcttttgccggattgcgcgagcgtggcatcaaggtattgcgtccggaaaaggtattctgtatgcccgatcacaatactccgacacatgatcaggataaaccgattgaagacccgatctccaagactcaggtggatacactgacgaaaaatgcgaaagatttcggtctgacacatttcggtatgatgcatcctaaaaacggaattatccatgtggtaggtccggaacgtgcactgacactgccgggcatgacgattgtttgcggtgactcgcatacttctactcacggtgcaatgggagctatcgctttcggcatcggtaccagtgaagtggaaatggtactggcttcacaatgtatccttcagtcaagaccgaaaacaatgcgaattaccgtagatggcgaactgggtaaaggagtgactgcgaaagatgtcgctctgtacatgatgtctaagatgactaccagcggagctaccggttacttcgtggaatatgcaggttcggccatccgcaatctgactatggaaggacgtcttactctttgtaatctgtccattgaaatgggagcacgtggtggtatggttgctccggatgaagtgactttcgaatatatcaaaggacgtgagaatgctccgcagggggaagcatgggatcaggctatggaatactggaaaacgctgaagagcgatgatgacgccgtattcgatcaggaggtccgttttgatgcagcggatatcgagccgatgattacgtacggaaccaatccgggcatgggaatgggaattacgcaaaacattcctactacggaaggaatgggagaggctgcacaggtttctttcaaaaaatcgatggaatatatgggattccagccgggtgaatcgttactgggtaaaaagattgattacgtatttctgggtgcttgtactaatggccgtattgaggacttccgcgcattcgcttctctagtgaagggacgcaggaaagcggataatgtaatcgcatggctggttccgggatcatggatggttgatgcacagattcgtaaggaaggaattgacaagatattgactgaagcgggatttgcaatccgtcagccgggatgttcagcatgccttgcgatgaatgatgacaagattcctgcaggaaaatattcagtatcaaccagtaaccgtaactttgaaggtcgtcagggaccgggagcccgtactttactggccagcccgttggttgctgctgccgctgcggtgacaggagtgattaccgacccgcgtgagctgatgtaatttcaatcgtaatttgtaaatatttaaattgtaaacagaaagatggctaagacaaaatttaatataataacaagtacttgtgtaccccttcctttagagaatgtagatactgaccagattattccggcacgttttctgaaagcaacgactcgtgaagagaagtttttcggtgataacctgtttcgtgactggcgttataatgccgacggttcgctgaataaggatttcgtgctgaacgatcctacgtatagcggacagatattggtggcaggaaagaactttggttcgggttccagccgcgaacacgcagcctgggcgattgccggatatggtttccgtgtggtagtatcgagcttctttgccgatattcacaaaaataatgagttgaacaacttcgtacttccggtagttgttactgaaggatttttgcaggaactcttcgactcgatctttgctgatccgaagatggaagtggaagtgaaccttcccgaacagaccatcactaataaagcaacgggtaagagtgaacattttgaaatcaacgcttataagaaactttgtctgatgaacggactggatgacatagacttcttgctaagcaataaaaataaaatagaagaatgggaaaacaaggcgtcaaaatagagatcatggacacaacgctccgtgacggtgaacaaaccagcggagtatcttttgtgccccatgagaaactaatgattgcccgtttactattggaggatttgaaggtagaccgggtagaggttgcttcagcacgtgtatcggaaggtgagtttgaagccgtgaagatgatttgtgattgggcagcccgccgcaatctgcttcagaaagtggaagtgttgggatttgtggacggtcatacttcggtggactggatacaacgtaccgggtgccgtgtcatcaatcttctttgtaaggggtcattgaaacattgcacccaacaattgaaaaagactcccgaagaacatatcgcagatattatcaacgtagtacattacgcagatgaacaggatatcggagtgaatgtatatctggaagactggagtaacggaatgaaagattctcccgaatatgtgtttcagttgatggatggcttgaagcagacaagcatcagacgttatatgttgcccgatacattgggaatcctgaacccgctgcaggtgatagaatatatgcggaagatgaagaagcgttatccgaatacccattttgattttcacgcgcataatgattatgatctggcggtaagtaatgtgctggctgccgtgttgagcggtgtcagaggactgcatactacgattaacggacttggcgaacgggccggtaatgcacccctttccagtgtgcaggctattctgaaagatcatttcaatgcaatgaccaatattgacgaaagccgcctgaatgatgtcagtcgggtggtagagtcctattccggtattgtgattcctgccaataaaccgattgtgggagagaatgtctttacacaagttgcaggcgttcacgccgacggcgataataagaataatttgtattgtaatgatttacttcccgaacgtttcggacgtaagcgtgagtatgctttaggaaaaacaagtggaaaggcaaatatccgtaagaatctcgaagatctgggactggaactcgatgaagatgccatgcgcaaggtaacggagcgaatcattgaactgggggacaagaaagaattggtgactcaggaggatttgccgtatattgtatcggatgtattgaaacacggggcgataggcgagaaggtcaagctgaagagttattttgtaaatctggctcacggtctgaaaccgatggcgactttaaagatcgaaataaacggaaaggaatacgaagaaagttcaagtggcgatggtcagtatgatgctttcgtacgtgcgttgcgcaaaatttataaagtgacgttaggacgtaaattccccatgttgacgaattatgcggtatctatcccaccgggtgggcgtacggatgcatttgtgcagacagtaattacctggaactatgacgaacaggtgttccgtacccgtggacttgatgccgaccagacggaggctgccatcaaagcaacaatgaagatgttgaatctacttgaagaataagttgattttatattaacatgcatttgatgcttccgatatgacagagattaattaactttgagtagtataaaagataaaaagaaaagtaacatggattttaaaattgctgtattagcaggcgacggtatcggaccggagatttcggtacaaggtgtagatgtaatgagtgccgtttgcgagaagtttggccacaaagtaagttacgaatatgcaatctgcggtgcagatgcgattgataaagtaggtgatccgttcccggaagaaacatatgaggtttgcaagaatgcagatgctgttttgttttcggccgtaggtgatccgaagtttgataatgaccctactgcgaaagttcgtccggagcagggattgctggcaatgcgtaagaaattgggattgtttgctaatattcgtccggtacagacattcaaatgcctgatccataaatctccgttgcgtgcggaactggttgagaatgcggatttcatctgcatccgtgagctgaccggcggtatgtacttcggtgagaaatatcaggataatgataaagcatacgatacaaactactacactcgtccggaaattgaacgtatcctgaaagttgcttttgaatatgcaatgaaacgcagaaagcacctgactgtggtagacaaggcaaatgttctggcttcttcccgtctgtggcgtcagattgcacaggaaatggctcccaattatccggaggtgacaactgactatatgtttgtggataatgctgccatgaagatgatccaagaaccagctttctttgacgtgatggtgactgaaaatacattcggggatattctgactgacgaaggttctgttatcagcggctctatgggattgcttccttcagcttctaccggtgaaagtactccagtattcgaaccgattcatggttcatggccacaggcgaagggcttgaatattgcgaacccgttggcacagattctgtctgtagctatgttatttgaatacttcgactgcaaggaagaaggtgcgctgattcgtaaggcggttgatgcatcactggatgaaaacgtacgtacacctgaaattcaagtggccgatggtgccaaatacggtacaaaggaagtaggacagtggattgttgactatatcaagaaggcttaaacagatattctgaataagatatatggaggctggattctttaaatggagttcagcctcttttttgttcattccgtttctttgtttttttactgaagaaaatgagtccgttgggagaaaaaactagtcggactgttaaaaagtaaaagagtaagatatttgctaatgaaaaacagtacatttgcacagattaatacacaagtgctatgacaaaaaattatctattcttactgttgggtttgctgcttgcagcgtgtagttctgatgacaaggacgaacaaccgattttagtaaccaatgttgtaatgcctgcttcgggaacagtattcaagcccggtgagaaggtaacgataatggcgaaaggatttcaagacaatgatgaaatcatgttcgatattcgctggccgcttcaagacgaagtgctgcatgaaggatatgctaaaggaggacggggtgttataacggaaaagacggctacgagcattacttttctggctcccggacactggcctgcttctacaacggaaatcttgttacgccgctccggtcaaatgatgtctttaggaaagatttcggtggcggatggacaggcacccaaagattttcagctttatggtatcattaattcccgttccaatacccaccgtcctcatgctatcgaatacatcaatcttgaaaagcctcagacggcagagatagtacgacttgcagacaatcaagacttctcttgtgtagtcaaccttcccggaagctggagccttagtggagtatggacgaaggatgatcgccgtacgaccggactttatgatctttctatgaactattgggaaaagccgggagctgatcagcttgtaacaatggggatagcgaccgctaactctgtatttggggtatatcaaggcggagaccgtttatttgttaaaacagttaatgtgatgccctataccagaatgtatgtgccggagaaacctgattatggttttctgctgcccgaagggatgaaggctgaagcattgtcacgttatccctgtatacaaatgagtgatggaaatatactctgttcggctgataacggcgatggaactttttcaccagtagtcttgaacgggcaaaatatagaagagaaaagtatatatgttggcgaaccgatagaggctgtggcattgatccctttttggatagttaagcctgtagaaggtatgggaacggctaaatatacacgtgttggcggatatatcgtatcgaagagaaatggtgctacaataacagagggagatggaacagaatttaggctatggaacccgactacaaagatgctggatgaacctttcaccacattccctaatgctgcgtgttcagtagccacacttgtttcggatgattttaagaaacaggagctttatgtattgtttgatggtagtcggaatggaaggctgatttatgtatatgatttactaaaaggtagctgggagtcattatatccagggggcggatttccttattcagaaatcgtattagcccgataaggttattactcagctcttctccgggctactatgcacaaaggccctttttcatgcttatatgaagcaatggagacaaagccggactgcaagagtatggatttcaattcatcacaagaacgaataatcatcccgtcaatcagatttgtccaagttttgactgacaggttattcagttcgcagcaaatcaggaaatgtccgtttcgctttaatacccgtgttacttcggtgaatgctttcggaagatcgttccaaaagtaaaccgtctcgaaggcagtgaccacgtcgaacatttcatcggtataaggcagtgtgtctaccgtgccttgttctataaaacagcgggtggaaagatatttcttgtttttcttctgtgcgaaaaggacactttccggagaaatgtcaatgccgtatgcttttccttgcggacagcgatgcatcagctgtgtaagattggctccgccaccgcaaccaatgtcgagcacattccattccttattccatactatatgtgacattccccattcggaaagcaaagtgtgtcgtttgttcatttcccggagaatgactcttccccaaaagccttcaggctttttgagattgtggaataacttatggatgatatttcttttgcccatgttataaactaactttgcacgatggaatagatgataatgcctgctaaagtcagcaatccggtatagatcataacttctgtttgtttcattccggcaccctttccaggaacaggagtgtctgactgaagtcgtgccgttaacttgtgggcgataaagtagaacagccaacctccgaatccaccgataatggctcctgctactaaatcaccgggataatgcaatcccaggtacaggcgtgtataagagttggtaaatgcccaaagtacgataaatatgcttaaccagcgtttacggaacaggcaaatcagaaatatggcaagtccgaaagaattggcagcatgacaggaagggaaaccgaatcctcctcctcgtcttccattcacaatatagaccaaatccgctatcggattttccggattggagggacgcaggcgacctaccagcggacgaagaaaactattgcacatctgatcggcaaacgtgatagtgagggcgatcgctaccacatagcacaaagccactttccaatgaaaattcttgagcagtatatataagatactggcatacatcgggacccatataactttacctgtgaatgcactcatgaagtaatcccagaaaggcgaatgtattccattgaagaacaaaagcagttgggtgtctatatccgaaagaaattctatcataaaataaatcgtattattaaaaggtggatttgtctgatcttatcgcttagccaggtcatcatatagtttctgaaggaaggctttgcctttttccagattggctcctttctctgtcccctcatctatctggacggtgttggcatccagattgtacactaattgattttccgcagtcaccatgccaaacagtgtcggttccgtgaaatacccgaagtggggagaagacggattaaagatattcttgctgaaagtaaagtcatcatgcggcaatccgagctgagaaagcagcgtagcggcaatatcgatctgcgaagcgtatgtgtctactactcgtggttctttcacggctcctccgatcagtattagcggaattgtatgcccttccagcggattttctaccggacgcggataagctcccaaatgatccggtacaagtacgatcagtgtattcttccacatcggggtctccttatactgtctcacaaaatctcctacgcaactatcagcataggcgaaagcattcagcactttatcgtctaatcggtagaacggaacttcaaacggctcgtgactgcttgatgtttgcacgattttaaagaaaggttcctgctgcttctcttctttgaggtctttcaggaaacgttggaaaagtgtatgatccggtgctccccatttaccctgacgttcggacaaaggaaaatccgtctcggagataatcttctcaatacccgatgaaaccaaataagagcgcatattggtgaagtctgcatcccctccgtaatagtattccaaactgtatccggcatttttcagactgcgaggaatggaaggaagtccgtccgttttctcaggatacttcattatgctggtactcggctgaccgggataaccactgataatagatgccagtcctcgatccgtccggaaactgtttgcgtagaaattagtgaataacactccttctttaccgaatttatccatattcactgctacattcggctgtccccccattgtttccattaagtgtgtagaaaaactttcgaggataataaagatgatattcgggcgttgagtatttagaatttgcgggatactgtctgttgctgccacaggtttatccagcatttcggccaacaggtcatctgcaactttcgggtccataaaccgatattgcttatcgaaattgttttgatgggtagcagaatacataaaactgaatgccggattgatggctgcatgattcatccgttggttttggctatagtatactttgctcaggttcattgtcgatacggaaaaaccgccacggataggaatgaagagcgcagctgtcagtaataaaaggacgagagatacatactgccgctgataaggtatcttcaacggtgctttctcccggataagtacggcgtagaaaataccgtagaggatggctgcatagatcagcatagctaggattccgagtaatatgaaccagaagctgacgcttgccatggcatctttcggagatgagaagaagtagaagatcggggtggcatccagccggaatccccagaaaccgtataagcccagatcgatgatgaagatgcaggacatcacaaaagcgatgattccaaagtaaccttgccggatgcggcgtagtatggaagatttcgtccaggcggaagcgataagcaggaagcccgggatggcagtcagatatcctgccagtgagaaatccagcggcaagccgtgccacatcacgctgaaataatcgccgattgaggcgtctgtatagagttcatggtagtaagccatgaaaataggtttttgaaggacaaacagaagaacgaacaaaaaataagtcgtgagaaattgcaggattctctttttcatatctataaacttaaaaatattgaacggagacaaaggtacaattcttttctgtatctttgcgcatcaacctgataaaacgaggtgaatgatggcaaaaattgcgaataaattaacagatttagtgggtaatacacctctaatggaactttccggatatagtggaaagtatggtcttaatcagaatattatcgctaaactggaggcttttaatccggcgggaagcgtaaaagacagagtcgctctttctatgattgaagatgcggaggcccgcggggcactgaaacccggtgccaccattatcgaaccgaccagcggaaatacgggagtcggactggcgatggtagctaccattaaagggtatcacttgatattgactatgcccgaaacgatgagcttggaacggcgaaacctgttgaaagcactgggggcgcagattgtgctaacagatggcttgggcgggatggctgcttctattgccaaggcgcaggagttgcgcgatagtatccccggatctgtgatcctgcaacagtttgaaaatccttcgaatgctgctgtccatgagcggacaacaggagaggaaatctggcgggatacggatggtgaagtggcagtgttcgttgccggagtaggaaccggaggtacgatttgcggcgtggcacgcgccttaaaaaaacataatccggatgttcatatcgttgcggttgaacctgcgtcgtctcccatattggcaggaggtcaggcagcatcacaccgcatacagggaatcggggcgaattttattccgaaactttatgatgcttctgtagtggatgaagtgataggtgtgcccgatgacgaagccattcgtgcggggcgagagctggctgcgacagaaggtttgctggccggaatctcttcgggagcggccgtatatgcagcccgacagttggcacagcgtccggagttcaggaacaaaaaaatcgttgcgttgttacctgatacgggagaacgctatctgtcgaccgagttgttcgcttttgatgcctatcctttggattaatatttgaatcatgataagaattattttaattttatttcttagctttccggttgccctgtgtgcgcagacctatcagcaattatcagaaaaggcaattgaatatatcgaaatggacagtctttccaaagccgaagaactactgcttcaggctttgaaactggagccgaagaatgcaaagaatgctatgcttttttccaatctgggattggtgcagcgtcggttgggtgaatatgacaaggcactcgaatcttattcttttgcgctgaactttgctccattggcagtacctattctgctggaccgagctgcgattaatctggaaatggggaatacagaccgtgcttataccgattattgtcaggtacttgacgaagataaacagaataaagaagcgctgttgatgcgggcatatatctatgtgctccggagggattaccccgcggcacgaatcgattataatcgcttgttggagattgacccgcaaagttatagcggtcggcttgggctggctaccttggaacagaaagaaggaaaattcaaggaagcgctcgaaattcttaataagatgattacggcaactcccgaagacgcgactctttacattgcccgtgcagatgtggaacgggagatgaagcatgaagatctggctttggtcgatttggaggaagctattcgcctgaatccttcttcggcggatgcctatttgttgcgtggcaatatttatctgacacagaaaaagaaagcattggcaaagatggactttgaaaaagctatttcgctgggcatacctcctgctgatttgcacgagcagctgaaacaatgtaaataaaagacaaaactaaaaacatattactactaattaatacccaaacagaaaatgaaacgtattgtttttttagattacgtgcgcgtgttcgcatgtttcctcgttatggtggtacacgccagtgaaaacttttatggtgctgccggatctacggacatggcgggaccgcaatcttttttagccagtgaagcagaccgattgtgggtggccgtgtacgatggtttttcacgcatggcagtaccattgtttatgattgtctctgcttatctgctggtaccgatgaaggagggacagacttcatggcagttctaccgccgacgcttcactcatatcctgccaccgttttttatatttatgatactctatagtatcctgccgatgttgtggggacagatagacagcgagacatcaataaaggatatgtctcgaatattcctgaacttcccgacgcttgccggacacctttggttcatgtatcccctgataagtctttacctgtttatacctattatatctccttggttgagtaaagccactgcaaaagaagaacgtttcttcataggactgttcctgttatcaacgtgtatgccgtacttcaatcgctggtttggtgaagtgtgggggcagtgtttttggaacgaataccatatgttgtggtatttctcaggctatcttggatatcttgtgttggcacactacatacgtgtacacttaaaatgggatcgttccaaacgtttcattgtaggactcatttcaatggttgccggggctgcgctgactatttactcattctatatacaggctattcccggaattactcattctacccctgtcatagaaataggatgggctttctgtacgattaactgtgtacttcttacagcgggtacattccttctcttcacttgtataaatcggccggaagctccgcgtttcgtaacagatatgtcgaaacttagctatggtatgtaccttatgcatatattctggctcgggttatgggcgacagtattcaaaaatacgctggaactgcctactgtttccgccatcccatgtattgcagtgactacatttgtctgctgttatataacgacaaagattatctcattcataccgggcagtaaatggattataggctaaatagatcggatgttcttgaattaaacaaaaaagggaagcgattgcttcccttttttgtttactcatcttattatatggtccttcctggttacgcttgaataagttactctttattaaaggtaaatcgatgggacggctcaatacattattatacaaactgcttaatcagattcacaaactcttttccatatttcttcttcttaaactctccgataccactgatttctccgaatgcttcgatggtagtcggccgtgaaatactgagcagatgcaacaccttatccgatagaatgatatatgccggaagaccatcctgatcggcaatctgtttccgcaatccccgtagtgcttcgaataaatcttcgttttctccaccggggataccgaaaggaagttcttttgcgatgaccaccttcttctttttcccttttcctgtgacgatttcttcccgatgaatcacggcaagcattgctttcgcttttccaaaaagaatgttacttccgcttggagtgattttgagatggttattttcattgtaggctatttcgaaatagcctagttgtagcatttgaagtaaataatcctgccagtcacgaggtggtatgtctcttcctgcgccaaacgtctttaattcctgatatccttttgccgtaacttctgccgaataacttccacgaagaatatcaattaatatccctgtacttatttgttgttctgcacgagctatggcgctcaacgctttttgtacgatgactgtaccgtcaaagcgttgtggagggtttttacagacatcacagttgccacaatcttctgttgaggtttctccgaaatagctcagcaggattcttctgcggcagatgtccgcttctgcgtattgctgcatacgttgcaacttttccagattgattgtctgttggttgctttctgtggcgaatttagttaacaggatcagatcgcccagtgaatagaacaatacagtatcgcttggtaagccatctcgtccggcacgcccgatttcctgataaaaactttcaatacttttaggaagattataatgaataacccatcggacattcgatttgtcaattcccataccaaaagcaatggtggcgcatactacctgaatacggtcattaatgaagtcattctgagtctcgtcccgatgctgcggagacaatccggcatggtagacaccgcatcggattccctgcttttgcagcatttgtgctacagtttccgttttattacggctcatacaataaatgattccactttcttctctgtggcgatggataaactccagaatcgctttattcttctcttttgcctgaaaaccgcgttttacgtccaggctgatgttgggacggtcgaaagaagaaataaacgtccggggctgtatcagatgcaactgtcggattatatcctcacgggttattttgtcggctgttgccgttaatgcaataatcggtacctgcggaaactgctgatggagcattcccatttgtgtatattcaggacggaagtcatgcccccattgggaaatacagtgggcttcgtcaattgcgaagagcgaaatactcatatcccgcaacagatagtccttttccgctatcagcttctccggtgaaatataaagcagtttcaggcgtccttcgatacaggcacggcggagattggcattttccgtttcgtcattgctgctattgagtgctcctgctgcgatgccgttggcttgcaatgtttctacctggtctttcatcagtgagataagcggggagaccactacagccgttccttcagaaagcaatgcaggtagttgataacagatcgatttacctcctccggtgggcatcagtaccagtgaatcctgcttgttcaacaggtggcggatgatttcttcctgtaagggtcggaagctgtcataaccgaaatatgattttagagtttctttcatcaacatttgtttaaactttgtggcaaaggtacgcttttctttagcaatctttatcatgtctcgatttctgttttgattttaatgccccaagagttaaagtttcttattattcacccttaattcctctttttcaaggtttttgattgttttattagaaaaaaaatgcacaaaataattgtgtgtttaaaaaaaaagtaagacatttgtaacatgtaacgttgcgaatgagcaattaataacaaataaacaaaccctaaccagttaattcaatgagtgatttagagaacaaaaaagcggaggaagctccaaagaaacgtccctacaatttgagggaaaagaaagaaaagaaggctgcatatcggtcattaatcagaccggaactggcagacgagttgtatgacaagattctgaacattgtagtagttcagaagaagtataaagatcctgactattcagctaaagatttggctaaagagttgaagaccaatactcgctacctttctgcagtagtgaattctcgttttggtatgaactactcttgtttgttgaatgagtacagagtgaaagacgctctgcatttgttgacagacaagcgttatgccgacaagaatgtggaagaaatcagtgcaatggttggctttgcaaatcgtcaatctttttacgctgcattttacaagaacgtaggtgaaactcctaacggatatcgcaagaaacacgctgaaagtaagaagtaattgcgttttccgatactgaccaaaaggaattacctctgaatgaaaagttcggggataattccttttcttatttaattaatcaatatcagtaattatgaaaaaacattttatttcgatggcagttaccgctacgatccttgcatcctgcggtggggccaaaacaacaactgccgaggcagataaatttgattatacagtggaacaatttgcagacttacaaatattgcggtacaaggttcccgaattcgaaaccttgacgctgaaacagaaagaactggtttattacctgactcaggctgcgctggaaggacgcgacatcctgtttgatcagaacggaaagtataacctgagaatccgtcggatgctcgaagccgtttacaccaattataaaggagacaagtcggctcccgacttcaaaaatatggaagtgtacctcaaacgggtatggttctccaatggtattcatcatcattacggcatggaaaagtttgtgcccggtttctcgcaggacttcttgaaacaggcagtgctcggaacggacgcccaattacttccgttatcagaaggacagactgccgaacaactctgtgatgagctcttcccggttatgtttgatccggctatcctggcaaagcgtgtaaatcaggcggacggtgaagacttggtgctgacttctgcctgcaattattacgacggagtcactcagcaggaagcggaaagcttctacggagcaatgaaagacccaaaagatgaaactccggtttcttacggactcaacagccgattagtgaaagaagatgggaaaatacaggaaaaagtctggaaggtaggcggactttatactcaagcgattgaaaagattgtgtactggttgaagaaagcggaaactgttgccgaaaatgatgcacagaaagctgtgatcagcaaactgattcaattttacgaaacaggcagcctgaaagacttcgatgaatatgctatcctttgggtgaaagaccttgattcaagaattgacttcgttaatggctttacagaaagttacggcgatccgctgggagtgaaagccagctgggaatcactggtcaacttcaaagacttggatgctacgcaccgcacagagattatcagcagcaatgcgcaatggttcgaagatcattcgccggttgataaatctttcaaaaaggaaaaggtaaaaggggtatctgccaaggtgatcactgccgctattcttgccggcgacttatatcctgcaactgccatcggtatcaatcttccgaacgctaactggattcgtgcccatcacggctctaagtcagttactatcggcaatatcacagatgcttataataaagctgcccacggtaacggattcaatgaagagtttgtctgcaatgacgaagagagacagcggatcgaccaatatggcgacctgacaggtgaacttcatacagacttacatgaatgtctgggacatggttcgggcaaattgcttccgggagtagaccctgacgctttgaaagcgtatggttccactatagaagaagcacgtgccgacctgttcggattgtattatgtggccgacccgaaactggtggaactgaaacttgttccggatgcggaggcttataaagctgaatattatactttcctgatgaacggtctgatgactcagcttgtacgtatcgaaccgggaaataatatcgaagaagctcatatgcgcaaccgccagctgattgcccgctgggtatttgagaaaggtgctcctgacaaagtggtcgaaatggtgaagaaggatggaaagacctatgttgtagtcaatgattatgagaaagtccgtcagttgtttggtgaactgctggctgaaatccagcgaatcaaatcgaccggtgattttgagggtgcccgtacattggtcgaaaattatgccgtgaaggttgatcctgctttgcacgccgaagtgttggcacgctataagaaactgaatctggctccttacaaaggttttataaatccggtttatgaactggtgactgacaaggatggaaatatcacggacgttaccgtgtcttataatgaagactatgtagaacaaatgttgcgctacagcaaagattattctccgttgccttccgtaaataattaatattgaaaatggatataaaagaacaactgaaggatatcaaaacacagctccgtctctctatgaacggggctgtgtcccaaagtatgcgtgagaagggattggtatacaaactcaatttcggagtcgaaatcccccgcataaagatgattgccgaagggtatgaaaagaaccatgacctggcgcaggcattgtggaaagaagacattcgcgaatgcaaaatcatggcagccatgttgcagcctgtggataccttttatcccgaaatagctgatatctgggtagaaagtatccgtaacatagagattgcggaactgacctgtatgaatcttttccagcatttgccgtatgcccctgctaaatcttttcattggatggctgatgaacaggaatatgtgcagacttgcggtttcctgacggctgcccgtcttttgatgaaaaagggagatatgacagaaagagcctccggcgaattgctcgatcaggcactttgcgctgttcattcagaaagctatcatgtgcggaatgcagctcttctggctatccgtaagtatatgcagcataacgaagaacacgctttccgtgtttgccggatggttgaaggaatggcagattccacagtggaagcggagcagatgctctataatatggtaaaagaagaagtggagaataagtaataggtaataagtaataggtaataccatgcgggcattcgccggatggaattttaagtaactacggttattacctattacctattacttattacttatttcccaaaattcttttgctttccacaaaaaaggcttaactttgttcgcgctaattttgtgctgatgatggaaactcaaaatgtgaaagatacagtaaggcagatattcacagaatatctcacggcgaacgggcatcggaagactcccgaacgttacgccatactcgaaactatctattccatcgacggacacttcgatatcgatatgctctattcacggatgatggatcaggagaatttccgggtgagccgggcgactctttataatactatcattctgctgatcaatgcacggctgatcatcaagcatcagttcggcacttcctcccaatacgaaaaatcatacaatcgcgagacgcatcatcatcagatatgtactcaatgtggtaaagtgactgagtttcagaacgaggaattgcagcatgccatcgaaaatacaaaattaagccgctttcaactttcgcattactccttatatatatatggattgtgcagcaagtgcgacagagctaataaacggaaaaaagtcagtaacaacaataaaaaagaaaaatgaaagtagatgttctattaggattacaatggggcgacgaaggtaaaggcaaagtagtcgacgtattaacacctaagtacgatgtggtcgctcgttttcagggcggtccgaatgccggtcatacacttgagttcgaaggacagaagtatgtacttcgttctattccttccggtatttttcaaggagataaggtaaatattatcggtaacggtgtagtgctcgatccggcattgttcaaagcggaagctgaggcactcgaagcatcgggacacccattgaaagagcgtttgcacatttctaagaaagctcatctcatccttccgacacaccgcatactggacgctgcttacgaagcagccaagggagatgcgaaagtaggaacaaccggtaaaggcattggccctacttatacggataaagttagccgtaacggtgttcgtgtaggtgatatccttcataatttcgaacagaaatatggtgcggcgaaagctcgtcacgaacaaatcctgaagagtctgaactacgaatatgacctcacagaactggaaaaagcatggatggaaggtatcgaatatctgaaacagttccattttgtagacagtgagcatgaggttaacaattatctgaaagacggcaaaagcgttctttgcgaaggtgctcagggaacgatgcttgatatcgatttcggttcgtatccgtttgttacttcttccaatacggtttgtgcaggcgcctgcaccggtctgggagtagctccgaatcgtatcggcgaagtgttcggtatcttcaaggcatactgtactcgtgtaggtgccggtccgttcccgacagaactgttcgacgagactggtgacaagatgtgtacattgggacatgaattcggttctgtaacaggacgtaaacgccgttgcggatggattgacctggtagctctgaaatattccgttatgataaacggtgttaccaaactgatcatgatgaagagcgacgtgctcgatacattcgataccatcaaggcttgtgttgcttataaggtagatggcgaggaaattgattatttcccatatgatatcactgaaggtgtggagcctgtatatgcagaactgccgggttggaagacagatatgacaaagatgcagagcgaagatgaattcccggaagaattcaatgcttatctgactttcctggaagaacaacttggtgtggaaatcaagattgtatctgtcggaccggacagagcacagacaatcgaacgttatactgaagaataagaaatgttattctattcctagaataactttgttctataacttaatgagaggcggagaaatggaaatgactccgcctttttgttttctctttacccccaatattaactataacgcattatgaaaacacatttcatcactttcctattattagtaggtatgagtctgggaatctcctcccggctccacgcacagtcttcttaccagcctggtgaagaaaacctcaaagcccgtgaagaatttcaggataataaattcggtattttccttcattggggactgtatgccatgcttgccaccggtgagtggactatgacaaataataatctgaattataaagagtatgccaaactggcaggcggtttctatccctccaagtttgatgcggataagtgggtggctgccatcaaagcatcgggagctaaatatatctgtctgacttcccgccatcatgacggcttctccatgttcgatacccaatattcggacttcaatatcgtgaaggcaactccctttaagcgggatatcatcaaggagctggcagcagcctgtagcaaacagggaattaaacttcatttctattattctcatcttgactggacgcgggaagattatccttggggacgtacaggacggggtacaggacgttcgaatccgcaaggagactggaaaagctattatcagttcatgaacaatcagttgacggaactgctgactaattatggtccggtaggagccatttggtttgacggatggtgggatcaggatggaaaccccggctttaactgggaattgccggaacaatatgccatgatccataaactacagccgggctgcctgataggaaataaccatcatcagactcctttcgccggtgaagacattcagatattcgaacgtgacctgcccggagaaaataccgcaggactttccggacaaagtgtaagtcacctgcccttggaaacctgcgaaacgatgaatggtatgtggggatataagattacggatcagaattataaatcaacgaagacactgattcattatctggtaaaggcagccggaaagaatgcgaacctgttgatgaatatcggccctcagcccgacggagagcttccggaagtagccgtacagcggttgaaagaaatgggagagtggatgaatcaatatggtgaaacgatttatggaacccgtggcggtgcggttgctccgcatgattggggagtgacgacgcagaaaggaaacaagctgtatgtgcatattctgaatttgcaggataaagccctgttcctgcctttggcagataagaaggtgaagaaggcagtactgtttaagaacggcacacctgtccgcttcactaaaaataaagaaggcgtgttgctggagtttacagagataccaaaagatattgattacgttgtagaacttacaattgactaatttttagctaattcttcataaaagcatagggaaactatcgttacatacgtagtttccctttatttttggcaaacaatttgtttatatagatatagagtaataattaaaatgaaaagtatatgatgtcttattgggtattatttattggtattgccgtagcaagttggttggtacagatgaatttgcagaacaaattcaagaagtattccaaaattccgacaggaaacggtatgacaggacgcgacgtagctctgaagatgctgcacgacaatggaatttacgatgtacaagtaactcatacacccggtcagctgaccgaccactacaatcctgctaacaaaacagtgaatctgagtgaaggtgtatacgaaagtaatagtatcatggcggctgccgtagcggcacacgaatgtggacacgctgttcagcatgcacgtatgtatgctccgttgaaaatgcgcagcgccttggtgccggtagtgaatttttcgtcctctatcatgacttgggtattgctgggcggtattctgctgttcaactccttcccgcaattgttgtggatcggtatcattctgtttgctaccactactttgttcagctttatcaccttgccggtggaaatcaatgcaagtaagcgcgcgcttgtgtggctgagttcatccggcattactaattcatacaatcatacgcaagccgaagacgctcttcgctctgctgcatacacctatgtagttgctgcactgggttcattggctacgctgatctattacattatgattgctatgggcagaagagactaagagataagattaatcgttttgacgcctccatcgttttcaaagactatggaggcgttctttttttattgatgttttttttagatatatgcaagcgttgctcggaaatttgcagtaaatttgcgcaattaaaatactaaacagtaattatatcatggcagcaaaaccaagtattcctaaaggaactcgtgacttttcgccggtagaaatggcgaagcgtaattatatattcaatacgattcgtgacgtatatcatctgtatggtttccagcagatagaaactccgtcgatggagatgctttctacactgatggggaaatatggcgatgagggtgacaaacttctatttaagattcagaactcaggagattatttttccggcatcacagatgaagagttattgagtcgtaatgctgttaagctggcaagcaaattctgtgagaaaggtttgcgctatgacttgacagtgccttttgcccgttacgtggtgatgcaccgcgatgaaataactttcccgttcaagcgttatcagatacagccggtatggcgtgcagaccgtccgcagaaaggacgttaccgtgagttctatcaatgcgacgccgatgttgtcggcagtgattcactgctgaatgaagtagaactgatgcagattgtcgatactgtattcagccgtttcaacatccgtgtgtgtattaagattaataaccgcaagattctttccggtatcgctgagattatcggtgaagcggataagattgtagatatcacagtggctattgacaaactggataagattggtctggagaacgtcaatgcggaactgaaagagaaagggatcagtgatgaggcgattgccaaattgcagccgatcattctgctgagcggaaccaatactgaaaagctggctacactaaagagcgtgctggcagccagtgaaacaggcatgaaaggagtggaagaaagcgaatttattctgggcacactggaaacaatgggcttgaaaaatgagatcgaacttgacttgacgctggctcgcggattgaattattataccggtgctatcttcgaagtgaaagcgctggacgtgcagatcggcagtatcaccggtggtggtcgctatgacaacctgacaggagtattcggtatggccggtgtgtcgggagtcggcatttcttttggtgcagaccgtatcttcgacgtcttgaatcaactggaactttatccgaaggaagcagtgaacggtacggaattgatgttcgtaaactttggtgataaagaagctgctttctctatgagtatgctggcaaaagttcgtgcggcaggtatccgtgcggaaatcttcccggatgcggcaaagatgaagaagcagatgagctatgccaatgccaagagtgttccgttcgtagctatcgtaggagagaacgaaatgaacgaaggcaaagcaatgctgaagaatatggaaaccggcgaacagaatcttgtttcggtggaagaactgatagctgctttacgcaattaaaagcagggtatagagtgagaatatccgcttttccggtgaagtacttgacaaatgattttttatgttgtatctttgggaaaagaaaaggcataaataaaatgaatataataagaaaaatagatacataaatatcacctttatactgttacttataagtaatagaagaacttggaatggggcaatgatcagatgattattgccccattttgtcgttaattatgcctgctatatttcgtctcgtacttaaaaagggacgaatatagtttttaataaacttgataccgtttttaataaacgtgcaataagtttattataaacagaatccgtgtttattaaaggctgtttttgtttttgtaaagataaaaaaatgcggctccgaatgaaaatagactatcggaaactatatagaatgaaatggtaatttcatataacaattgcttcttgaactcatattttcggaaggcttaattccatttcttaattaaaaactttagatcttcgttttatattagactgaaaaaataaggagagccggacagtaatttttatctttgtgcatacattgaattgatagcaaatatatgaaaaacaacaacccccaaagtaatatgaaaacaataagaaacacactttttctaggcataatctgtgctgccagtattgcctcctcgactgctcatgaactcgaaaccaatgagaactccctgaagaagtcggtgaaggcacagacaagaaaagagattgttacgttcttttctgaatctctttccggtaagacaaccacttttgacgcaggaaaaccgttgaaactgtcagaagtagaacactatcgtgatgtcgtatggcagttgtggaaagaggcaaatgatggttttaaagaagaaaaattaatagctttggatacactctcatccgcttctaccggctattgggaacttcctgatagtttggaaccaaatgcagtgatgccctattactggggaatgaaagggacagatgaagcaggaaatgaacttccattattcctctatctgcatggttcgggacccaaagagcgggaatggagtaccggattgaatatttgccggaattttgatgatgctccttccgtttactttattccacagattccgaacgaaggcgagtactatcgttggtggcaaaaagctaaacagtttgcctgggagaaattgctgcgacaatccttactcttgggaaagattgatcccaacagagtgtatgtttttggaatctcggaaggcggatatggcagtcagcgtctggcctcattttatgctgattattgggctgctgcgggaccgatggcaggaggggaacctttaaagaatgctcctgcggagaattgtagtaatattgctttttctttgcggacaggagataaggataccggattctaccggaatacactgaccggatatgtacgggaagcattcgatagtttggcgcatcagcatcccggctatttcactcacaagatagaactgattcccggaatggggcatagtattgattatcgtccgacgactccctggctgaagcaatatgtccgtaatccttatcccaaatatgtaagctgggagaattttgaaatggacggactctaccggaaaggattttataatctgtatgtgaaggaaagatccgatgaagaggggaagtcgcgtacttattatgaaatgagtatttcgggaaatcatatttcattgaaggtcgatgatgttgtttatgaagctacggagaaggatcaacgatggggaatagagatgaagtttgcgaagaaatatgcgcaggtgcataaagggaaagtggtcatttatctctgcgacgagctggtcgatttaactgaaaaggtgactctgacggtgaatggcaaaaaggttttcgagggaaaagtaaaggctgatttgaagaatatggttaatagctgtgcggtgttctttgatccgcaacggctttatccggcagctatcgaggtagaattaaaatagatgagattacaaagtagaagtatccccggtagtatatccaagaattactcttgtgtacgaccggggatacgtatttatcataaattataaatggcgttccggatacatttccttccaccattccggttgatcctgtagccaacgggcaaaccatgccatgatggagttatgccatttgattcgcttgtcataatcggagatgaaatggttttctccgtctacggtcacgaactctacagtcttgccaagtatcttcaatgcgttgaaaagctggatactttcaccgataggcacattggtatctaccgtaccgtgtagcagcagtaacggagtgtttatcttgtcggcgttgaacagggagccttgtttggtgaacaagtccgggtccttccacgggtaactgtcggctgcggcgatggcattgtaggaataaccccagtaaccttcaccccagtagctggtcacgtcactgattccggcgtgcgatacggcagcggcgaaaatatccgtctgcgtctgtaaatactgcgtcatgaatccgccataagaagcaccgagacatccgattttcttttcatccacaaacggatgctctttgcagaactgcttcgtgccttcgatgatgtcatctgctgtacgtttgccccacgcattgacgtggcgggcggagaattcctgtccgaagccaatcgttccgctaggctggatgacgtagaccacatagtcacgtgaagcgaataattgtgcgcaatacggattactgattccgcgggtagtcggagtcgtaccgccatagtaatatacaatcatcggatatttcttgttcggatcaaaattcggaggcaggcacatcttgccagtgatgacagttccgtcggaagcggtaaagttccacggctctgttttgcctaattctattttctccagaatcggtttcatcgggtcggcaagcaggctggaagtctttttcttcatgtcatagagataggccactccggcgttgtagtccgattgaccgatgtaagctgcgatgcccggattgtattcggacaaagcgaaagcgctggtaacatccgtttcgaggttcagcttctcaaattttccgtccttcggagaataacgatagatgtttttgcaatcgccatcgtccgtattgaaatagatgcacccatcgccatgattccattgcagagggctgactgtcggatgaaagtctttggtaatcggttgtatcttgcgggtactcagatccataataaaggcctgagtatcgaaatcattggcaatagggtgattgccacaattctttccgatgccgccgaacgcttcggggctgccggtcagcaatagctgcttgccgtcaggagagtagcccgcacctccgataaagcggtcttcatagaaaagagtatccactttcaacgtttccaaatctacttggtaaagtgaggacagagagaacggacgttgagtgatgttttctttggatgtactgtataacatgtattttccgtccggagaaatatcttgcagatatgtgctgtggttgccataggtcaggcgctcggagacaccgtcggccaggttgtatttcgcaaggaaactccgtccgcgggaattgggaatacggtctgcaggacttacgatgcggcggagaggaccatcttctttgactccttcttcgcggggatagtaaatcagaaaatcttcgttgggcgaccatctgaaactctgttcgggaatactttgcaaaatcgtttcttcgcggagtgtggcaggatcgagggtgattacgtcatttcctgtcagggcagttaccgtgtagtataacttgtcacttttaggcatccagctcatgccgtctctgagattggtcaggagtacttttccgctctttagttccgtcagttcgcaataagtgcgtgagcgtttggcggcgtggttatcccaataacgggtcagcagatactttccgctgggagagatggaaacagagatggcacggttgccataaactgtattgtcgagagaaaaacgcttctttgcttccggatctagattgcaggcgatatccttgaatttctcgtctttgatcagttcgcatttcagcgttggagccgctttgtcgtcggaagcagaaagcagtttgatgattatctcgtaatcccgctccggttcaaggctgagagcgatgtcacgtgatgagccggaggtgatgctgtcttctgccgcatcttttacttgcttggaggctccgtcaatgaagacttcccagcggacgggggaggtgattttcaacttccctttcaggaaacgttctgcacgaatctgagtcttaaccagataaagtttattgtctttatctgctttctcgaagctgagataccccgctgtgtccgcagtgagcgactgcatcggtgcatccggcaaatgtagtacgaccggggtctggagtaacatctttttggtgtgtttttctcctttaggattgatgctgtcgttcataatgggggtacgaacgctgatggcattccggactttgtactgtgtcagtcggtcttgtgcttgcatagtaacaccggttgccagaaagatggccaaagccatagttctctttttcatttgtttatgtctaaagttaataaatatttgattgcgtgactaatataagacaaatgcttgaagtctgcaaggttctgttctttttattttaatattctatttgattaagtatcccgttaaggaaagcgatagctactccgtaatttgtcatcggtacattttgtaaccttgctctttcgatgcggttcagcacatatttgcggttgaacatacaagcgccgcaatggattaccaaagaataaggagtaaggtcctgcgggaaatcagttcccgccacgatatctatcgataacttttctccaatccgcttttttaacagatgcggaagttttactctcccgatgtcttcggatagaggggcgtgtgtgcaggcttcggctatcagtacacgggaagattctgtcagacttccgatggctgaggcacttttcacatagtaccggatatctcctttataacctgcaaaaagaacagaaaaagaggtcagtctgctttcttcaggcttttgctcgtagactgttttaaagacttgtgagtctgtaataatcagtttaggagggcgggagagggcttgcaacgtttcctgtaacttatctgtggtgcagctcatgatcagacatttcttgtcgagcaattcccgcattgtctgtacttgtggcaaaataagcctccctttgggggcttgaatatcttgtggcatgaccagcaagacaagatctccttccgttaccaggctgcctgtgatactttgctgatcgaaatcttccggcaacttttccagaatggcttgtcgtatcagttcgacgcctgtcttctctttggcactgacaggaatcggctggcttccaaaagtctcctttatccggatggcaagggatgcggtgttcttccgtatatctgccttgttgatgagcagaatggtcgggatgttttttgccttgagttgttccagccaatgaagttcttcggtaaagtccggttctccggtttcctcggcagagccaccacctgcacaaagcagaagggcgatatcggttttctctacggctttccatgtgcgttcgatacgcctgtttcctagttcaccttcatcgtcaaatcccggagtatcaatgaacaggcaaggaccgataccgtgaatttccattgctttctgcacggagtcggtcgttgttccgggagtatcggaaacaagagcggtatcctgtccggtcagtgcattgatcagggaggattttccgctgttacgctttccgaagagggcgatgtggagccggttggcattgggggtgtggactaaattcataaatcaagcaattgttgtaacgttaattatccgcatggaaacttggcaggggcaccttgccccttaaaatctgaaatctctttttccttccgcaatatcttttaagttccggatggctatttctctgattttgggattcggaatccggtcggtctctttggctatcagcttcatacctttgattcgggtgtcttccgacgcataatcttcgaggtattctttcagagtcattaatgcattggggccgcagcagttggctatctgtcctgatttgactaaggacataaatcggtccccggtgcgtccttcccgatagcaagcggtgcagaagctggggatatatcctgattcgagcagccagttgaccacttcgtccagtgtccgggtgtcgcttacatcaaattgtgcggagttatcttccggaagttccgtttccgcatagccgcctacgctggtgcgggagccgccgctgatttgtgagataccgagttcaagtactttttcgcgggactcctgtgattcacgtgtggatataatcatgccggtgtaaggaaccgctatccggatgacagcaacaatcttgctgaatatatcatcggaaatcgcattgggaaaatcccccgcatcgatgtcgtccgccgaacagatgcgcggtacgctgatagtgtgcggacccacaccgaaacgggcttccagatgttctgcgtgcatcagtaatcctacgaagtcatagcgataggtattcagtccgaagagtactcccattcctacatcgtctatgccgccttccatggcgcggtccattgcttcggtatgataagcatagttacttttcggtccggtggggtggagagcttcgtagttctttttgtgataagtttcctgaaataggatatacgtgccgatgccggcatctttcaaccggcgatagttctcgacggtagtggcggcgatatttacgtttacacggcggatagccccattcttgtgtctgatactataaatggtccggatggattccagtatatactccagtgagttgagagtcggatgttcgccggcttcaagtgccagacgtttatgccccatatcctgcaaagcgattacttccttgcgtatttcttcctgcgtcagtttcttgcgggcgattgttttgtttttggcatgataagggcaatatacgcatccgtttacgcaatagttcgacaggtaaagcggtgcgaacataacgatacggttgccgtaaaacttctgtttgatttctttggcgagatggaagattcgttctatcaggtcaggttggtcgcattccagcagggtagctgcttcacggtgcgtcagtcccttgcaaagagcggctttttcgatcagctgttctatgaatgcgcggttgtctttgtgactccatgcatattcaagagtttccagaatctcttcatgatgaatgaattcttctgcttggggtgaatctactttatacatttctttattgtttgtaatcgcctctggagaaggagatttgataaccgatcttttccagctgctgttgcaatatgttgagtccttccgcagattccgctccgagggaggctttgttattatacagattgtactttttgcgttcttcctgtggcgacaaattgggcatgacaacattggcgcctgccagtattccctgttcccggccgtcgggagtgagggtagccagtgccgtagttgccggaatcagcgccgacggatgcatcagacggaagatggataataaaaggagcgtccgttccacggttccgctgggggactgggcaaaaggtgtgtcgcgatgagacaggaaggggccgataccaatcatttcggggcgaagctgttcgataaacagaatatcctgaatcaggtgttctatcgtctgtcccggactgccgaccattattccggtgcctgtctgatagccgatgtcctttagatcccgtaagcattgcagacgatgctcgcatgacataccggcagggtgcagttgttgataatgttctttgtcataagtctcgtgacgcagcagatagcggttggcgcctgcctgaaagaaacgttcgtatgcttcccgtgacttttcaccgagtgacagtgttatggcgcaatcgggataactccggcgaatcgttgagactatatcctctatccgttcctctgtcagtgcggggtcttctcctccttgcagcacaaaggtacggaagccgagtccatacccttgcttgcagcaattcagtatattttctgtggataaccgataacgttccagattcggattccctttccggataccgcagtaatagcagttatttcgacaacagttactgacttcaatcagtccgcgaataaaaatccggtttccgaaatgacggagactgacttcttgcgcctgtttattgatatagcgcaatgattctccgtcacattcggtcagcagttgccggaattcttccggtcggagtgtcctttcttctcgcagtttatctatccattgtctcatagctttctttccgcttgagcagctcttgtgctaattgacgacgtcctgaaacaatgtcgttgtgcgtactcggtccggtgatacagccaccttcgcaagccatcacttcgataaactgtcccgctgcttttcctgttttggcacaggcacgcagcaaggctatattttttttgttgatatccgacacttggatagcattgatcttgtccgcttcttctttcagatatgcttttacggctcccatcacaccaccggcttgtgcaaaaccatgtgcttcgcggacggaagtatgcagtatagagaaagaattcacctgttccagctgaatgtccattccatccaagatagaacctacttcctcgaatgtcaggatatagtctacagcatcgtcacggcgtacctcttttcgtttggctacgcatggaccgacaaatacaatcttcgcatccggatgtttctctttggcgattcgtgccgcataatacatcggtgatcctgtggtagaaacatacggtttcatttccgtcatgtgcttttctaccagttcaatgtaagaaggacagcaggaagtagtcatgaatttctgaccttcttccagtttttccagcagttcgtgtgcctcattgctggtggtcatcatggctccttcggctacttcgataatgtcggtgaatcctatttctttaaaggcgccgtatacctgttcgatagaagtcttgaactgtccgaggatggacggagcgatgatggctaccaatttttctcctttcttgatgtgttgcagtacatcaaaggtttgtgaaatctcaaagatagcaccgaacgggcaggcattcatacattttccacagtagatgcacttgctttcgtcaatatgttccacgccatgctcatctttgctgatagctttcaccggacaggattcttcgcaaggaacagggatatatacaatcgcgtgataaggacaactcttatggcagataccgcaactgacgcaagtatcatgatcaatcattgcctgaccgtttttcttgaaacgtattgcatccttagggcaattcatatagcagctgcgtgccacacatccccggcaaagattggtgatttcataattaatctgtacgcaggaagaacaggcttcgtcaatgacacacatgatattttccttacttggttccgggcggttcaatgccatccgtgcatattcggagagaggagttacttcgtcgtgttcgtccgtcatatccagtcccatcagcgggaaggtcttgtatctccatacagcacgttctttatgtacgcagcaacgccccagcggttttgatttgcgcggactcagctcaatagggagacggtcaattttttctactaactggtcgtttttccagagtctgacgagatcagccagcaatttatgccggacaatcataatattattagtaaaagccatatagtaattaaaagggttgttagtgggtgcaaagatagtaactagtttgcggataaactaataatcgttaaattgaatgtagcagattgttacattaatatttccggaaggataaaacagcctgtatgcaggagactatttccctccggttggttaaataaattcaatatttaaggtttttgaaacattcttgtcaattttttgtagcatttcggtgttatctttgtgaaacataaaataagagaggagaagagatatgagtagcagtatgttggaacaaagaagtcgttttgcgatgatcggtgcattaatgatcatcatcagcctgatgttttggtattatatggggagttcgctggttagtgctacaaagaagtacctcgaacaggtacagacaatagagatcacttgcgagtaaaaaacagatatttgtttgtatagagcgatagttatccggctaaaatcattacttttgccgcaagcaaaccaaataatgatggaagagaaagagaaggcctggaaaacagtaagtagcaaatatctgtttcgccgcccgtggttgacagtacgctgcgaagatatgctattgcctaatggaaaccacatccctgaatattatattcttgaatatcccgattgggtaaacacgatagcaataaccaaagacggcaaatttgtatttgtccgtcagtatcgtcctggattgggacgtacctcttatgagctctgtgccggagtttgtgataaagaggatgcttccccattagtttccgctcagcgcgaactgtgggaagagaccggatatggaaaaggaaactggcaggaatacatggtgatatctgccaatccgagtacgcataccaacctgactcattgctttctagctacggatgtcgaaccgatagatcatcaacatctggaagataccgaagatttgtctgtacatctgctgacttttgaagaagtgaaacaactgctggaaaacaatgagatcatgcagtcactcaacgccgcccccttatggaaatatgtggctgaacatgcggcagactttgaacaggaatctgtcgagaaggtggaacatgaaaaaacggaaaccatctcacaccgtatcaacgatttgctttattatcagaactcaatttcacggtctttgtcccgttttctgaaagatgaagaagtcgagacaggaatttatgagatattaaaagatattttggctttttatcgggcgggacgtgcctatattttcgagacggacgaagaaaatcatttttataactgtacctatgaagttgtagcggaaggagtaaaagcggaaataaataaattgcaggaaattccggtagacttcatggcgtggtggacatcacagatattgggcaagaagcctattttatttgaaacattaaagccgatgcctggaatggggcagggtgaatatgaggtgttgtcccgtcagggaattaaggctttgatggcgactccattggtagttaatgatcatgtctacggatttatgggagtagatttggtggatggttccgcttcatggtcggacgaagattatcgctggctgtcttctttggccaatgtaatcagtatttgccttgaactacgtagagcgaaagagaaagtaatcttcgaacaagcagctttggcacgcagtgaaagactcttcaaaaacatctttgccaatattcctgccggggtggagatttacgataaagaggggaatctggtggatttgaacgagagggatatggatattctgggaatttcagataagtcggaggtgatcggactcaatttctttgaaaacccgaatgtggatgcccagatacttgagagtatacgcaagagcagtattacggattttcgtgcccgttattcgttcgaatgtgcccgccacacggggtattatcgtccattgaaagccggtgtcatcgaactttatacaaaagtccgcaaattatatgataatcatggtaaccttaccggatatatccttattaatatggataatacggagcgtattgatgccttgaagcctatttctgattttgagaatctgtttcttcttatatctgattatgccaaggtgggatatgccaaactcaatctgctgaatcgtcagggctatgccatcaagcaatggttcaagaatatgggagaggatgagaatacacctctttccgatgtagtcggtgtttactccaaaatgcatccggatgaccgttcccgtatgcttgctttttttgaagaagcaaagaaagggaaagcaaaagccttcaaaggtgagatgcgtattttgcgtcccggtacgaagaatgaatggaactgggtgcgtaccaatgtagtgttgaatctctatgagccggaaaaaggccaagtggaattgattggagtcaactacgatatcactgccttgaaagaaacggaagccaaactgatagaggcaaaagagaaagccgaagaatccgaccggttgaagtctgctttccttgccaatatgagtcatgagatacgcactccgctgaatgccatagttggtttttccagtctgatggtggatacggaggacatggaggaaagacggcagtacatggatattgtggaagaaaacaatgacctgttattacaattgatttcagatattcttgacttatcgaagattgaggcgggaacgttcgatttcaccgaacgtgaagtggacgtaaatctgctttgtgaagatattgttctcgctatgagaatgaaggccagaccgaacgtggaaatcctttttgaccgccatctgccggaatgtcgcatcatgagtgaccgcaatcgtttacatcaggttatttccaactttgtaaacaatgcgcttaaattcacggaagaaggaaatatacgggtaggctatgatcagcttgatgaggctcatctgcgtttctacattgccgatacaggcataggtattgagccggaaatgcagaacgagatttttgagcgtttcgtcaaactgaattcctttgtacatggcacaggactcgggctttccatttgccgcagtattgtggaacaactgggtggcgagattggcgtagatagtgaaccggagaaaggttcttgtttctggtttaccctgccgataaagtaaagttgttcttcctttgtgcggttagtccgtgcagttctttctgataaagactgtttagagtgccggcatgggggcactgacattttttaagatgtcgctttgagcaagatagctgctattattggcataaataaacataacacttccatctttaattgtattaatgatgggtttggctagttttgtcgggagggcaggacatcccagacttctccccaaacgtcccgaggcggctactgtcggattggcgtatgaagccccgtgcacgacgatggaacgttcttttgctttgtcattgattcctttttcgagtccgtttaggatgagtgaatagccgtttccgccttggtaagtgttttcagtgagataaaatcccaatgagcttttataagagccgttttggttggagaaagaagtggcataattctctccgctgtttcgtccgtgtgagactactgatgaatacagcagttgtttcttctccatatcgaagacaaaaaaacgtttttcggtagacggctttgagaagtcaatcagcgtcagaatcggtttactcttctccttgatgcggttgtaaccggcgacagcctgacggaatgcaatgaaattgacaattccacccaactccatttcttcaaagagctgttcgccggcagctaattcggacacaggagtcggaaagtcagatgcaggaacggccattgtgtcaactgaaacatggctgaatggaatgaaaaggaatgataaaaataatataactttctgaagcatagggcttaagcttgaaataaaatcgcggtaaagatagggatttttattccaaaacaaaaataatcgtctcattaacaggtgcccagtcgaaaataaatttggcatgggaagttgcgttccgtacacacatatgtgatcggggagtggttcccagtgaccagctatattctatctgtgtctttcggggctcattgacaggtactccgtgaatgtaggccccgtccgtgaagcggctggcgtaaggcgcatagcctcctgtctctttcgagccgtctttcagaaatatcattttcaccttcttttcctgcagtacgaacattcctaaaggagtttcctgcgcatacggcggtcggtgaagtccggtagtagaagggttcatactgcgtactacccatttccctttttccgtgcgttccagtgcggtaatattctgattatggcggtccacaaagatggctttattgaaaaccaccgtatctccgatcactttgacatactttttaggaatcatccattcgccttctgtaaatatcggttctgctttgacaaagttttctccgtcttcgatgaaacgcgtcagttcaccatcctgcccgtagcgttcgggtgttaccgtatccgtcagcagataaagcgggacagactggtatcgttctaccccaagtgtgtccgctacccgtccgtaggcatttcttttgaagtttttcaccaatggagcttcaccgtttctgttcttgtaattctggaggatagcccattgagacggctgtatttgtatattttcgagcaaagcaagctgttcctttattttctcccattggaaactgcgggtcgtatctttataaggatatgtatcttccagcgtgtacttatcatacagcagttctttggtgatttgaatttcttccggagtaatctttttgacgacaggttctgccacagtttccgcaattgtatcctgtgccagcgaatcgacctgcaaagtttcatcagaagatttttgtcctgtacgtgaagtgcaggaacagagtacgcaaaaagcgatggatatgccaaaacttattttattcatataatctatacagttcatcttggggttcgtttacgaatatacgttattataaggaataatccgcttctattgtttaaaaagtgtggaacaaatatgcttttttgccattaataacctgttgtcagtcattttgtcagtcaatttctgccaaacaatcattattttgctttggcatacttttcgcaactgatttagcgtcttcttcaagaagaggacaaatcatgaatataatgtataacaaataaaatcaaaaaaaagaactatgaacattaaaccattagcagacagagtgcttatcctccctgcacctgcagaagaaaaaacaattggtggtatcattattcctgatacagcaaaagaaaaacctttgaagggtgaagttgtggcagttggtcacggaacgaaagacgaagaaatggtattgaaagtaggcgatacagttctttatggcaagtatgccggaacagaacttgaagtagaaggcactaaataccttatcatgcgtcagagcgatgttctcgctatcctgggttaattcaaaattctaaatttatcatattaaaataaataagatatcattatggcaaaagaaatattattcaatatcgatgcccgcgaccaattgaaaaaaggtgtcgatgcattggcaaatgcagtaaaagtaactcttggcccgaaaggacgtaacgttatcatcgaaaagaaattcggtgctccgcacatcacaaaagacggtgtgacagtagcaaaggagatcgaattggcagacgcttaccaaaataccggtgcacaactggtgaaagaagtcgcttctaagactggtgacgatgcaggtgacggtacaactactgcaactgttttggctcaggctatcgtagctgaaggtttgaagaatgtgactgccggtgcaagcccgatggatatcaaacgtggtattgacaaggctgttgccaaagtggtagaatcaatcaaggcacaagctgaaactgtaggtgacaactacgacaagatcgaacaggttgctactgtatctgctaacaatgatccggtaatcggtaaattgattgctgacgctatgcgcaaagtttctaaggacggtgtaatcactatcgaagaagctaaaggtactgacactactatcggtgtagtagaaggtatgcagttcgaccgcggttatctgtctgcttatttcgttactaatacggaaaagatggaatgtgagatggagaaaccttacattctgatctacgacaagaagatttctaatctgaaagatttcttgcctatcctcgaaccggctgttcagacaggtcgtcctctgttggttatcgcagaagatgtggatagcgaagcgttgactacattggtagtaaaccgtctgcgttctcagctgaagatttgtgctgtgaaggctccgggcttcggcgaccgtcgtaaagaaatgctggaagatatcgctatcctgacaggtggtgtggtaatcagcgaggaaaaaggtctgaaactggaacaggctacaatcgaaatgctcggtactgctgacaaggtaacagtatctaaagattatacaacaatcgtaaacggtgctggtgtgaaagaaaacatcaaggaacgttgcgatcagatcaaggctcagatcgttgctactaaatcagattacgaccgtgagaaattgcaggaacgtctggctaaattgtcaggtggtgtagcagttctctatgtaggtgctgcttctgaagtagaaatgaaagaaaagaaagaccgtgtagacgatgcattgcgtgcaactcgcgctgctatcgaagaaggtatcatcccgggtggtggcgttgcttacatccgtgctatcgattctcttgaaggcatgaagggggacaatgcggatgaaacaacaggtatcggtatcatcaaacgtgctatcgaagaaccgcttcgcgaaattgttgccaatgcaggcaaggaaggtgcggtagttgttcagaaagtacgtgaaggtaaaggtgacttcggttataatgctcgtacggatgtttacgaaaatctgcatgctgccggtgtagtagatcctgctaaagtagctcgtgtggctcttgaaaatgcagcttctatcgcaggtatgttcctgactacagaatgtgtgatcgtggaaaagaaagaagataaaccagaaatgccgatgggcgctccgggaatgggcggcatgggcggaatgatgtaattcttcctttccggacataaaaataaggtatggaaccgctttccctgtgggggaggcggttcttttcttacgtaatgaattatttagcttcgtttataatattcttcgctttcctttcataaagcaatgctttggatatccaaaagctatgctttatggttgctaaagcatagctttaagctgccatacgggagatgttataaatattattttcaccttcactttaccttcgaaatcctttatttatcggtgatatcgggtgaaggactagttattcactctttgaactgaaaatgacattcgttcatgaaagtattattcattttgctataagctaatttatttttgctataatgatatttgcattagctataaccttaatggaaagatgctaatagattatttttttcttctcaatgtttgttttaaacatcctattgattgtttttaaatatcctattgattgtatgtaaatgagtggtcgattgtatctgacttgtctgaagagagaggtgaaggtacctcctttcacccgctatcattgatgaataaagggtttcaaagaaaaggtgaagggtgaagcccttgtttgatcattctaaactctcctccttcctgaaggaggggaatttagttacttttgacacatcttctttctataactggataatgtttaaccagtccaaatttttttggggcacttcactttcggacaccctctttttgtatattatcatttgcctctgtacggcttaatctgccggaaatccttgtcatacagccctaccagtaaactctgtcctttattatctactctcaatccaccataggcggcacgattatagacagaatcctgtccttcttcaaaaaagaaggattcggcaccgaggaataacctgccatttattgttttatatttcaggacgatctcattttcatttactggttcaagggattcctgaagacgtattatttctccgacgtgattcttgtcaagcttgagcacagcataaccgcgtttagctttctgtctgtttatcaactcggaatttgcttctttatagttaagtctcatataatctccttgcatcagcgaacggggatcgacaggagccagttgcaataatacgagttgtccctctttcagcgtctgttctttctgataaacagaccagttaaaatatcccagaagaagaattaaattagcgataatcagtattcggctatattttttcatgtcttgtctttttttgagtgaaaatataccaggctatgagcaatgcgattcccgtaaagaacaaggtgatcgatttcgtcagcaaggtgatatccagatcatagtaatatttggatatggaatagatgaagaggaggagcgcaactgcggactcagctttataaccgtactgaaaacatatcagtatcagcaggatactgcccgatagataaggggcatgcagactgggaaagcagatcaggatacaaagaagatagatgcacacctgatgtaccggactcttaacctgcatcacctgcacgattttataaaccatcagaaggatacccaccaacatgaaaacagatatgatccagtcatttgtgctttttgtcaagtaattgacagacaacccggccaatgaaaggacacaagatacgaacagaccggaatgaataggtttatatttagacaaatccccgttcgtatagctgagtatttttgtctcagatagattgacgaataagaaaattgctataataggcacggcagccacattcagcggattcagtgaagagaataaattcgttatctctccgaacagtgccatatagaatgagattaccgaaaggaaggtcaggatgaaccctttggataacagcatcgttactacactgatccctatcagtacaataaagaggacatccatgtttctattcattccataaccggctaatatacatccggctatgtagcatgtaatattcatcgcatccagaaaaggtttggtcaggaggcgattgacaaataaagtagtaatgatcaggatacttcctgtaatcaggcaggatgtttcggatcggagaatggaggaaagtacaagaaatcccagaaagaagatagcggtcagcactcctccgataattgaaaggacttcgattgtcaggttactcttctgtgccataccattgtttttttaggtgaaggattgcataaatcaataaagtggtaccggtgataacaataattcctgagaggaggaatatgttgacgtccctaaggttactgtgacagataaacagggatagtaaaatcatcagtatggcaaaaggaatggcggaaagatagaataaattcctttgtctccatccgaaccataaccctgccgagaacagcagaacggtacttgcgagcggaatggatacgattgtatccttttcgcagattactgccatcataagataagtcacatgcacaatggtcgccagagaaagcaggctgacaaaccaacggttttgtcggctgagggtacctttgatactcatccattctgtgacgaccgttgccgaagcgcaaatccaggttactgcattggtcagtaaagtgactgcccattggttatccggcactatttgcatagcgtatagccatatggtagtacagagcagtccgataaacgtcagccagagcggagtgaaacggatggcgaatgcccaaaggatggtgaacagtgtccagcccagaaataagtcatacgcatcagcgcctgtctgatagatttgtccgaatacggcaaagagtgtacccacaaggaatgtggctccggtgaggattatctgtttgataagtatattccatcgggtaaatactgttagcagaacagatgcaacaagcaatgtttgtacgattcccagtttggcgaatttgggaagatcttcccagttataggcgaagaaaaagataattcctgctaccgtaaaaccaacgcctgctgctaacagaaaaatagaaagaaattgtttccattgttttttatcggcatacatcggttgcctgaataggagtgaagagtccggtttttccatgtacttttcttttttgatgattacaaacataagaaaataaaatgattatctttcggttggatatataaaaaaggcagaatctgattcattgttagtctgtaatgagatcagattatacctttctgaagataatcatcttgtctgtgtgcaaggataaatatcgttgaagaaggaactgtcagaagacttcccgtatatgtttataattcgaattaatagtatcgatcacttcctgtgagcgtccgttaatcaacagtttatacatggactgggcgaagcctaccatctgccccaactctatcttaggaggcatggcaagagcgttcggatcggtcatgatatttaccagtaccggaccatccagttcgaatgcatttaataaagtagtcagtacttcttccggattgctgacattgaagcctgtcattcccattgcttcggctacttgcgcgaagtccggattcagcatatttgtctgccagtccggcaggccgtctacttccatttccagttttaccattcccagggagcggttattgaagacaatgatcttaatcggtaacttgtattggacaacggtttccagatctcctaaagtcatcgacagacctccgtcaccacagagcgccactacctgacggtcggggtaggcaagcgctgccccgatggcctgtggcaaagcattcgccatagaaccatgattgaaagaacccagcatatgccgttttcccgtagcttgcagataacgtgcaccccatacacaagtcattccggtatctacggtgaatattgcatcgtccgacgccagtttatcaatctcggacatcacatattccggatggattttttttatatctcctttattttccgtataggctgccaggtctttctttactccttcatatcttttcagttgtttcagcaggaaagtatcatcagtcttggggtccagcatacgcaataatgcctgaatagtcattcttacatctccgcaaagtccgatatccactttggcacggcgtccgagccgttcgggtttgatatctatctgtgctatcttgatgtcatcgggcaggaaagcggaataaggaaagtctgtgccgagcataagaagtacttcggcttcgtgcatgctgtaatagccggaaggcattcccaacagtccggtcattccgacttcataaggattttcatattgtacttccatttttcctttgaaagtatataccacaggagcattcagcttctccgaaagcgcgatcacttcctcgtgtgctccccgacagccgatgccgcagaaaagagtaatgcgtttatggttgttcagcaactctgccaattgtatcaagtcttcttctgccggacagacttctggcggagccggataattctttaccgaagaatcgacggaaacggaagatgccttggccaggtctcccggtaagcctacaacggctactccttttcgggtgatggctgtctgaatggctgattgaagcatacgcgggaattgtcccggagtggttgccacttcattatagtagctgcaatcgttaaagagttttatagtattggtctcctgaaaatattcagttccgaattctccgctggggatggtggaagcgatggcgatgaccggtgcgcctgagcgttgtgcatcatatagcccattgatgaggtgaacatgccccggtccgctactgcctgcgcagcatcctatccgtccggtcagttgagcttcggctgctgcggcataggctccggtttcttcatgccgtacatgtatccattgtatcttattgttctttctgacagcttcgtttacttcatttaaactatcgcccgtcacggcatagatgcgctctacgcccgattcaactaatgtttcgatcagttgttctgctattttttttgccatatttctaataggtttaggattgattcttaatgtaataacagatgtatgccaagaaaagttctgttttaacatatgctaataagtccgttgtgtcggtacacatcgcaggttttatgttaaaaataattttgtaacaactttttagtatctgggagggaacaattgtgatatccatttgttatctttataggcgaaatcttaacctaatgtttataacctcttaatagctgtagaaaatggatagaaagcaaatcggtgtgtatgctggtaaagtctggcaactgctgagcaacaatgagaaatggggctatggtaccttaaagagaaagtccgggttgaaggataaagaattgggtgccgctctgggctggttatcgagagagaataagatagagttcgatcagtgtgatgaagaactttatgtatatctctgtgtaaatgtttatattggatgaaagaatgtctgatgttttaatgagtacaaattaaatccccgaagttacatctttgtagatgaggcttcggggattttggttttttattctttctctttcttctgtattttcatctcgatgaggaaagctgccagcagccctgcgccaccgaaaagaagtacacatgcgccatacacgacacttgcctgacgttccacgtcccagtttctggaagcagtgtatcccggaaatgagttgatgcagataaagaaggcgaccagtagacctaatcctattccaagcatcagcagaccgctttttaaagaaccgaaggtaaaccgggagcgggagtaattaaggttgagggataagttactgttgatttctcccgtgttgactctgtcagccagcttttcaatcatggctatccgctctttcctgcatacaaaaagttcaaataatttgtagattcctaatgtaatagtacctactaccaagggaatggtgataaaatccatcataattatactgtttttaagtgaatattttcgttctttgtatcgtttgacgcagtggacggaaaaaggttacactgaaaagcagataatttataatcctgtattttttcttttccggattgtaaccttttgtatcggggagcgtctaaagagtcaagatggaacagaaagacgaatcatactatatcgaacgcatactggatggagagacggaatacttttccgtatttcttgaccgctacagtcgtccgttgtatacgttggtggtgcagatcgtcggttgtcccgaagatgcggaggagttgcttcaggatatttttctgaaagctttccgcaacttgaatcgttataaaggcgagtgccggttttctacatggatttatcgcatcgcttacaatgccgctatctcggctacccggaaaaagaaacaggagtttctttatatagaagagaatacgattaataatgtacccgatgagatggcggacaatgtgcttgctccggcagaaaccgaagaacagctggatcgtttgagtcaggcgatagatcagttgagcggagaagagaaagcattgattactttgttttattatgaagaaaagtcaatggaagagatcggtgaggtgctgaaactttcgatcagtaatgtgaaagtacggcttcatcgtacccggaaaaagatttgtgtattgatgaataataaatagaagagaggatatggaagaggaaagaaagataaacgagaatacgggcaatatgctgaaacaagcattggaacggaggcaaacggaacgactgtcttccaatttttcgtatcggatgatggagcgtgttcatcaggaggctgagaagcagacgaagcggaaaacgagaatcggttgggcagctttgctgatatcggctttggcgttggtagggctgggtgtctatgtgctgactttctatctggaatttaactttgccgatgtgatgccgcaaatgaatgtccggcaggattcttctttgtttgcattttatgtctatatcgcacttcttgcattggtcttgctcggattagattattggctgcgcaagaagtatatctggaaataattctgttactttgcatgacaattaaaacaatgcgaagaaacaagaagaaacaatgagaagttttgcctctgataataattccggtgtgcatccgttggtgatggaagcattgagccgggcaaacgcagatcatgcgttgggttatggtgatgatcgatggacggaagaagccgtagccaagataaaagaaatctttacaccggactgtgtccctttgtttgtattcaatggcacgggcagcaatgtggtggctttgcaagtaatgacgcgtccgtatcattcaatcttctgtgcggaaactgcccatatttatgtagacgagtgcggctctcccgtgaaaatgacaggttgtcagattcggccgattgccacaaccgacggtaagttgactcccgaactgatgcagccttatctgcacggtttcggcgaccagcatcattcgcaaccccgtgcgctttacatttcccaatgcaccgaactcggaacgatttatacacccgaagaactgaaacggctgactgactttgcccatctgaacggtatgtatgtacacatggacggagcaaggattgccaatgcctgtgccgcccttcatctttcgctcaaagaactgactgtagactgtgggattgacatccttagtttcggcggaacaaaaaacggactgatgatgggggaatgtgtgattatatttaataaggacctgcaacgggaagcccgttttgtccggaaacaatctgctcagctggcttccaagatgcgttacctttcctgtcagtttactgcctacctgacggatgacctgtggctgaagaatgccgctcatgccaatgcgatggcaagcaagctctatcaggcacttaaggaactgcccgaagtcacctttacccagaagccggagagcaaccagttatttctgaccatgccccgtccgactatcgaccggatgctggaatcttatttcttttatttctggaatgaggcgaatcacgaaatccgcctggtgacttcttttgacacaacggaagaggatgtaaatcaatttattcgacttttgagacgttaaaagagaagaatggaacaacaaaagcgtctataatactgttgtaataggaagtttggggctaactttgtccccgtaatattgcttcttgttatgatggatgctagacgaaacggacttgtattattggcgctattgttgttgacacaaaccactataagtgcgcagactgattctatgggcaaagatgtgccgatagattctgtctctgtggcaacctcagactcgcttcagacaaagcgcagtttcttcaagaagtttcttgattattttaatgacgccaataaggaaaagaaaaataaaaagttcgatttcagtgtgattggcggtcctcattattccagtgataccaagtttggtcttggattggtggcggcggggttgtatcgtacagaccgcaatgattcgatccttcccccttcgaatgtttctctttatggagatgtctctactgttggtttttatctgttgggagtaagaggcaatcacctgttcccgcaagagaaataccggttgaattataatctttatttttattctttccccagtctttattggggaaggggatatgataatggagcgaactctgataatgaaagcgactacaaacgctttcaggcgcaagtgaaagtcgacttcatgtttcgtgtagcgaaaagtttctatatcggaccgatggctgtattcgattatatagacgggcgcgactttgagaaaccggaactttgggaaggaatgtcggcacgcactacaaatacgagtctcggcctttcccttctttatgactcccgtgattttctgaccaatgcctatcagggatattacttgcggatagaccaacggtttagtccggcttttctcggtaataaatatgcgtttagcagtacggaactgacaaccagctattaccatccggtatggaaaggcggagtccttgcaggacagtttcacactttactgaactatggcaatcctccgtggggattgatggcaaccctcggaagttcttactcaatgcgtggttattatgaagggcgttatcgtgataagtgtgcgatggatgcacagatagaactccgtcagcatatatggaaacgaaacggagtggctgtatgggcaggagcgggaactgtatttccgcgcttctccgactttacgtcgaagcatatccttcccaattatggtttcggctatcgctgggaatttaagaagagagtaaatgtacgtttggatttagggtttggcaagcaccagaccggatttatatttaatatcaatgaagctttttaagaacataaagaaatggtttgaaaatcaggaacacttgttttacttgtttctgatcatcctgataatgcccaacatcgttctgtgtttcacagaacccttgccgttgatggcgaaagtaagcaatgtcttgttgcctttagcctgttactatctgctgatgactttgtcccgcaactgtggcaagatgctctggattttgttcatcttcctgtttttcggcgcctttcagattgtgctgctttatctgttcggacagtccatcatcgctgtagatatgtttttaaatctggtaaccaccaattcgagtgaagcgatggaactgttggacaacttattgccagccatagtcaccgtagtcatactttacattcctgccctgatattgggtatgatttcaattatccgcaagcgccggctttctgtgacatttattcgcagagaacggaagagagtcttcatcctgcttggaatctctcttctcgccctgggcggagcttactgggaagactcccgctatgaactgaaatccgatctttaccctctcaatgtatgctataatgtgggacttgcttttcaacggacggcattgacgcaaaattaccatcatacctcgaaagattttactttccatgcccaagccactcatccggcggacaagcgtgaagtgtatgtaatggtagtgggagagacttcccgtgcattgaactggcaactctacggatatgaacgggagacgaatccgcttctgtcccgtcaaccgggaattgttgctttctccaaagtcctgacggagtcgaataccacccataaaagcgtacccatgctgatgtccgatattacagcctataacttcgactccatttaccatcaaaaaggaatcatcacggcctttaaggaggcaggttatcagacagcctttttctccaaccagcgctataatcattcctttatcgatttcttcggaaaggaagccgatacattcgattttataaaagaagattcgttggattccgcctacaatccttctgatgatgaactgctggcattagtagcgaaagaattatctaagggaaatcagaaacagtttatcgtacttcatacatacggttcacatttcaattatcgtgaacgttatccgtcagaagacgctttctttctgcccgattatccggtagaagcggaagtgaagtaccgtgataacctggtgaatgcctacgataacaccatccgctatacagatagctttctgtcacgtctgattcagatgctcgaagaacagcatgtggatgctgcaatgctctacacctccgatcatggagaggatatttttgacgattcccgtcatctgttccttcatgcttctccggttccttcttactatcaacttcatgttccgtttctgatatggatgtccgacacctatcgggaagcttatcccgaacattggcaaaccgtgaccaagaataaggataaggacctatcttccagccgttcattctttcctaccatgctggaactgggaggagtgcaaacttcttaccgcaacgattcctcatctgtagtcagccctctttacaccatgaagccgagagtatatctgaatgaccataacgaaccccgccccttggatgatctgggaatgaaacagcctgacttccagaaatgtcaagtattaggtattaggtattaagtaataagtattaagtattaatcgtagcttcgtaaagctttgcctgtacggctacggtgtaatacttaatacctaatacttattacctattacttattcattaatccttgttaattcttatatccaaaagcatgattggcgtgttatttgcgatataaaagtatgaacgattaaattcataaaacatggcttatatagattattataagattcttggagttgacaaaagtgcttctcaggatgatataaagaaggcttttcgtaagttggcccggaagtatcatcctgacctgaaccctaatgacccaagtgcgaaggacaagtttcaggaaatcaatgaagccaatgaagtactgagtgaccctgagaagcgtaagaagtatgacgagtatggggagcattggaagcatgccgatgagtttgaagctcagaaaaaagcgcggcagcaagccggtggctttggaggtgccggaggttttggcggattcggtggtggcggtcagggattctctgatggtgacggaacgtattggtattcgtccgacggtggcggtggattctccggaggtaatgccggtggtttctccgatttcttcgaatcgatgttcggacatcagggcaggggacaaagttctgccggattccgtggacaggactttaatgcggagcttcatctttcacttcgtgatgctgctcagacgcataaacagatattgactgtcaatggtaaacaagtacgtattaccattcccgcaggtgtggccgacgggcaggtgattaaactgaaaggttacggagctgaaggtgtgaacggaggtccggccggggacttgtatatcactttcgtcattgccgaagaccctgtattcaagcgtttgggcgatgacttgtacgtagacgtggaagtagacctttatactgctgtattgggtggtgataaagtcgttgatacgctggacggtaaagtgaaactgaagatcaaaccggagactcagaatggaacgaaagtgcgtctgaaaggcaagggattcccggtctataagaaagaaggacaattcggtgacttgattgttacctattccgtcaagattccgacgaatctgacagaagcgcagaaggagttgttccgtcaattacagagtatgaactaaaatgaatgagcactatgcagaccgaattaattattgtcagtgaatactgtcaaaagtgtcatattgaaccttcattcattgagatgttggaagaaggtggtttgattaatgtacgtaccgaagccggcaagcattatctgcttgtttctgaacttccgaacgtggaacgttatagtcggatgtactatgacttatccatcaatatggaaggcattgacgccattcatcatatgctggaaagaatggacgatatgagacgtgaaattacttccctccgcaagcaacttctgttgtttcgggaaagggaaatagaggaagcggactggtaaaaaaacgaagcctctgtttgatgcaaacgaaggctctatttatagcaaacagaggctctgttcacgtagatcagagcctctgttttattcggaccgttacagtacaaagaaaactatctgatgtacgtgcagatttcttccagatagcgtgcatccgtttcatcaaagctgtccgttgtatcactgtctatatccagcactccgatgacgtttccttcttttataataggtactactatctctgacctggaatcggaactgcaggctatgtgaccgggaaacagctctacatcaggaacaatcagcgtctgcgcttccttccatgccgtgccgcaaactcctctgccgaaacgaatgcgtgtacaggcgatgggaccttgaaacggtgctaatacgagttcgttgccttccaccatataaaagccgacccagaaaaagtggaaagtctgcttcagtgcggcggcaatatttgccagattggcgatacgattcgtttccgagcttaccaatgcttgtagctgtggaagcagttcacgatatttctcttctttattacctgtgtgaatcagtaaattttctgccatctcttttctatttgatttggtttagaatactcgggtcttttattttatcatcctctgcgaagaaaatgattttcgtcagtatctccgctgttttcgggtcttcatccacaaaaggcaggaacagtcgtccgcgactttgcgagtgtaccggaagaacggctatttgtgcaccgcctgctttatggataacaccactgcccaaatgaatgttgtatttgcccagcttgccttcgatgtatgcaaagttccctttcaccctgacgttgctgaagtgaaacaggggtagggtaagttctaccaatgcacggcgcatctcgatggtggaatggctggtttccggatcgacacttccggcgtgagccacactgacggcgaggtctacatccctcatcacttcggagaagacaacaggtggaatctccgaaatcttcatcggtttataatccttgcggttatggaagcagacaaattccagcgtgggagcttcgatgtcggcaggagagaaccagtccgccatcgcataaatcgtggcaataatattctctttatagtatatcttctgaagtccgtcctcgtaatcggctacccagcggcgtcctttcagtacggcaaccgttttctgcggttgaatctgattgccggcgtaacggcgggattgcgtagcgtctttctcttccggtgtcgggatgtacaattcgcggaatacctgcttgaaaggctggcggatagctttgtcaaacaagaacttctgataagcatgccagttgccactcgcatacaggtctgtgggatgggcgatgcgtagttcctctttcggagtgagcggaagacagatgccgtcagccgttatcaataggccgtcggtgtagaagcctgttctgccgttgctggtgaagaccaggtttctcagtagcggccagataaccggattcttcatcagcttgcgcagttcgttttccttaaaacgggtacagtcctccattgcctgttcgagcatgatgcgggaacgggcgtgctggtctttcagtattttgtgtaccgctttcagctcttccacgtatgggtgctttttcagtttgggaggcaggctgttcagctcttttccggctcttacttgtttgatctccggtttgccttcgttgttgacttgcacatagacttccacgccttctatttctttgggggtcaggtaaggagtgatctccttgatcagttccgtttccatgctccatgtcagacgggtgacgtctccgtaaccggagttgcgtgccaggttttgcagggcgatggcaacggctttcttttcactttcctgtctctgtgcaccaaattccttgctctctttcaggaacttttgcaggaactgatagcgttcgagcaattccttgtcggccttccggcccagcgggataaggccgtagctcatcagtaagtctttatttcgcttcgctatgatttctttcttcgcatctgccgctttggtcttgccgttgacggcatcggcaaatttacgggcgcgggtatgcgtgttgcttaatgaaatatatttggctgcattgtacactacttcgaaacgttccttgccgatagtcttgtaggcttccttgaaccagtcgatgtcaaaagcaccttcctgaaggtcttctatggcaatcggggtatatcgggcgatgatcgctttcttcttgtcgtcgaaacattcgctggtatgggcatggaagtagtaagcggcgctttccagtcctttccatccggtcgcttcttcggtgagttccagccattgcggggcgaacatggcagcttccaccagtcgtatatggctgatgtcggcctgactggcgaggcttttgagtgtatcgctgtcgtcgtccggagacgggtagcaggcatggagcaggctgctcaatactccccgtttggtgttgcgccagttgtaactgtcacgtatgaaggtgtctttgccgaacgcttgcaggatacggatcagtgtttccgctccgtagacgcggtgaagctcttctgccagacgggtgacctgagtctcggaatctccccgctgcaattctatttccagaattcggttcactactttctgagtcagtgaatggaagagggagtggttgcgctcgtccagtgccgaagtgatatctttgatgcgtgtgggcgagttgacacgtcccatcagttcccggtatatttcttcggtaggaatcagtcccagcatccatgcgtgggcaaagtccatgctttgcaggtagacatccgtttcttccagttcgggcgtatgctccatatagttggtgagcttgtagagctggtaccggacggtgaaataacgggtgaagagagcgtcattgatgggatgctgaggcgcgtcgagccagaaccgtacaaacttgttgttgtgtatcgggtaaacgatctcccttgctccatattcctgcttgtctctgagccatgtatgcttattggtgtattgacggaagatattctttgtattgagcagaggaagcaactgcaaaagcatattgacggagaactgctgataagttgcttcgtttctgtattcatgtgccagtccgtcgataatatcttctatctgcctgtaataggtcagcttgcggagcgacttttgcagcccgcggtaagtgaagcctgcatacatcttattgataagcggttcgaatgtgttgagcgattggatagcggcttccttgtcttcctgttcttcttcgtcaaattcatcgtcttcgtcctcttctatttcgttgggtgctccggtagaggccagcatgaacttcatcatcagcaatttgtcgtaactgccgatttcctgttgatagaaattcagccagagttccggaagtccgagttcgctcagtccgtcgtagtgcttgtaccagttcagtaagacactgttgcccaccaggcgtacttcaccatatttatccgtgaattcgtcttctttatgcttttcgatgtatttgttcagcttgtcgaagatcgctttggcttttcctaaacgaataaactcaaatgctttcttcacattgaatccggcatcgggagtaatcggaggcaggctgacttcaagcgccggatcgtatagcccgaagccattctctcgggtatagttacttgtcgggctttgttccgtaccgtctccgatcagcgattcgatcagaatcttttctttggcgttcggcttctgaatctctctgacggtggacaggagtttctgataactgtctttcaggaaatcaacgttgcggatgctcttcatcatatccagtccggcaaggcggcgctcggcattcttgtcgctcagcaatcggcggatactggccgccagttgtgcttccggctgtttcatcagcagattgatggcattgatacgcatctcgctatatttgaaacggagcaattcttctatatgctgatactgttcgggggacagggacatttcggacaatactttgtatgcttcatcccgtatgtctgccgaacggtcgccgagtgattgcagtacatattcctgctccaccttgctttcggtacggggcaggacgattccgatatagctggcgcggttgtaagattcgagcgcgggaagatacgtgcaaagttcctctctcagccggatatcgttggtcatccatgcgatgtacgccattttgaggactacatccgaacgggtgagcaccacacaatcccacgggaatacataaggcgaatagacttccttggcggaaatagactggtagacttgtttcagatatccgtagtgacggaccgcctcttccggcgtttcaaaataatcgctgagtgtgggagcttccttgttatcgctgtatcggcttagataaagcccgtccatataaagaggaaggatagccgccaccactttcggatcgtcgtgccacacttcgaatgcgtctttgctgatcagatgattcatctgagacgattgcgtgcagcgcaggaagtacagtaacgtctgtatctgatgcttggctccctttcggatgatgtccggtacgatggctctgatctcgtccgtatcatagaatccgatgctccacaaagccagataaagttcgactgtatccttgctttgcagggtattgcgggctgtttcgggatgattcaggaaattccagatcagttcgacatacttgttggtaatccgttcgctgctgtcctgttcgccgattccggtgcatacggcgatgcttcgcttgacggaggcaaaacgttgcagtccgttgttgtagatgatggagaacaggtagaggtaactttcgggacatccttcgtccatcgtttccacgatggcttggcgcagtccttcttgtagcttggctgccagcagcagtttgccttccagttccaacagcgggcggtgtccgctgatggcgatggcgtggagataccagcgttgcaggcggtggacattgttttcgctggtcagtacctgattcaggtattcgattactttttcgttaccttgcgctatttgtgcggccagccagtaggaagagttcatatagccgctgaattcttctgtatcttcgggtgtatttcctccttttaagatcgcttccactgaaaatccggtagcgcgtaactttaaaaactgtagccatgcgtctctggcatggtccagatgattggacggatgggcggaacgctgggcgcgccggtcgtatccgatggtatgcggacagcgtgcttcgagttgcagataagtatggaacagtccggcgaattcgtcgcccaacatatagcggaacagcgtgttaagtctgccatccatcagattggcaatgctttcgatgttttcttcccggatgatctcctccagacgaggttccagtatctcactgaatataccataccgtcctcccatgtccaaatcctccatgaataggtcgaacagggtaagcgtttccggctccaggcttgatttttcctttagtaaactctccaaataggggtttagcagcttgttcaatttgtcgttgtaagtaattctcatgactttaagcttttagagtttatattgcagttaccaaagtcttcctgacagcattgccagccggataaaggtaagtgtagattcttctttcagttggacggaggaggataattctccgagttccgcatcgtccagaaagatgcggaagattccgtcttcatacgattgcaaagcattgatgatggcttcggtttccacagccggtctgccgttatagtttgcttcgaagcctactttgccggcggcggccttgtcctccatctcttcacaggtgaggtatttcagcatttcactttgttgcagccgttcgttgtactcctttacttgccagcagacgaccgcttcaatcagttcctgcacactggcaggaggagtggggaaatcgatcggcatcttttcgatgctgcatttcctttttcctacttgcttgacttggatatatgctttcatacttacttttatttttcgatttgaatactggacgtgattgcgtccagatcagcctgagccttttcgtccgcaaccagcatgacgatggcaaagactcttctcttattctcctgaaagtacaataatacggtttgttgcatttcttctcctttttcgtcggggtggccgatccgcaaaggattggtcgtcttcgtcataggcaggccgttgatgttgactttgctctgcttgtaatcctccgagggctttccttcctcatttcgggggagggtgaggagcagcttcttcatacgttcgaactcatcctgcgtatcatagctgttgctggtcacggtcagctgactgccgccattgacgagtttcagcaggggaggctccgaatcgggagtcggcgctttcgtgccggttatcttgtaccagttggtaggatactggcaactgaactttgatacagcatcatagcatgaaagccacgtatcctcatccgacatgggagtatacgggaactgttcggaagtggaagatttccggggactgccggtcaccgggcggctggcgctttttttctgttcttcttcctgttccttataataggcttctacaagtccgcttttccattcgttacgtatttcctgatacgtcgaggggatattgcggcagagtgcaaggaagctgaacaggaagacactgaagatgatcagttctccgatgatggaaaccgttcttccggcttcgggcttcttcatccgttcgccgaatacatagatgaatcccaaaaggaatccgctgagtaaaccgccgatgtgtgcggcattgtctactccggcccgtatgccgtagatgagattgtagcctacgaagataagaatactggtcagcaaagccttccgctgcgacctctcgatgcggtggaacagcaggaaagccagaaagataccgtagagtccgaagatcgatccggaagctccggtactgatcgtttccgcatgcatatagaggctgaagacagccgaacagagtcctgtcagcagataagagacgaacatacgacgcgtacctatcagatgttccagccagatacctatatatataaaggcgtacatattcatcagcagatggaaagcgccgatatgcacaaagttgcaggtcacggcacgccaccagtcaccggtcagggtgagcggaccgaagtcggcgccccagttcagcaaggccagtgtggaaggttccagaattcccgctccggtagctgccatcagtatgaagacaaggatattgatgtctatcagaaccggtgtcgcgatgaatcctttccgggggataaagaaatggatgaaagacgactctttttcgctttctgcctgaagcctccgttcttcttccgtcagcgggcgggtgagttcttcttccagttcgttggctttttgtgccagttcctccggtgtcagagcagatttaatctcttccatcgtttcctgtagtttttggatattcttgcgatttttgccataatctaccagttgtacggaggcgcattgactgcggacggatatttcaccgctgtttccttcttcgatggtgaaagtcacttcttctccttgggaacgcatacccattggaacataaaatatgacttcacgaagagcgattccttcgatattccattcaagtttctgagacgcttcgagtgccagtatcagaatttgtgtatttgataaatctgcaaaatgtagcttatcctcgtgtaaaggtctgagtctaaacgccatatttctctcttttattaagtcgtagattgatattactctctttttgtacaaaagtacagaataataatgaaatagagggtaaatgggagggggatatttatgcggacaacgagaatactaatactttgagatttagtaagttccttttggaaagaagaggacaaaaaaagcatccgcttcgttggaagggatgcttttatcgttagtcacccttttagggttactttttgtagaaagcaaggtcttctttatccatatttttgataaagttggtatgcttcgtaacttccgcttcagcaaagttcagatatacatgtgcagatttggagaacaggtcggcagccttgcttgcgtcctgaatcagcaggtggcacatgatgatatcggcagccatttccatcagtctgcgggctgtgaagtcgagcagttcctgatcctgtgcttctttaacggcgttggtgctggcttcgaacaggtctgccatcttcttcagacgtgacatcagcggttccatttccggtgaacaaggtactgtttcgaattcgcggatcgtagcaaggtaagaaccgttggttacatagcggatagcggctacagtctgcaactgggtggtaccttcgtagatgctggtgatacgtgcgtcgcggtagatgcgctggcaggcatattccatcatgaagcccgagcctccgtgaatctgtatacagtcgtaagcgttctgattcgcatattcggagttcatacctttggcaagcggagtgaaactgtcggctaactttgcgtatttcttctgttccagacgttcttccggagtcagcttgcgttcgcgtgagatgtcgtccagtgctttgtagatgtctacgtagcgggctgtctgataaagcagcgcacggccggcatccagcttacctttcataatggcgagcatgtcatacacggcagggaagtcgatgattgcttttccgaactgcttgcggtctttggcataggccagtccttcattgtaagcagcctggctcaatcctacagattgtgcggcgatacccagacgggcaccgttcatcaatgccattacatatttgatcagaccgagtttgcggtcaccgcaaagttcggctttggcattcttgtaaaccaattcgcaggtaggagaaccgtggatacccagcttgtgttcgatacggcgtacatccacaccaccctgacgcttgtcatagatgaacatggacagaccgcgaccgtctctcgttccttcttccgaacgggcaagtactagatggatatctgcatcgccgttggtgatgaaacgtttcacaccgttcagcagccaacaaccgtctttttcgctgtaagtagctttcagcatcactgcctgaaggtcggaacctgcatccggttcggtcaggtccatagacatggtttcaccctgacatacgcgggggatgaaacggctgtgctggtcggcattaccgaattcatacagtgtttcgatacagtcctgcaaagaccagatatttccgaaacctgcatcggcggcagcaacgatctcggcacacatggtgtatggagtgatcgggaagttcagtccgccgaaacggcgtggcattgtcattccgttcagaccggctttgaccatcgcgtccagattttctttagtgccggaagcgtattctacccgtccgttggcacagtgaggaccttcttcgtcaacgccttcagcgtttgcgttgataatttcgcctgttatttctccggtgatctccaatactttatcgtaagagtccagtgcgtcctcaaaatccagaggagcgtagtcgaattcatctttatctctgtagttgcgttctttaagttcgcaaatacgtttcatcatcggattgttcaagtgatacttgagttccggtatttctgtgtaaaaattagccatctttctttacttgctattctgtttataatacttaatcatcttcggcacaacttcttcgatggttccgttgattacatagtctgcaatcgtgttgatcggagcatccggatcgttgttgatagagatgataataccactttcctgcataccggcgatatgctggatttgtcctgagataccacaagcaatgtagagtttcggacgaaccgttacacctgtctgaccaatctggcggtcgtgttcagcaaaacctgcgtcaacagcggcacggcttgcacctacttcggcgtgaagttcctttgccaggctgaacagcaggtcgaagttttctttcgaacctactccgtaaccaccggcaatgatgatcggagagcctttcaggttgttcttcgctttttctacgtggcgttcgattactttgaccacatagtctgtgtcggctacgtacttcttcacgtcgtggcggatcacttctccctgataagccggagaaacgatttctttcttcattacaccttcgcgaacggttgccatctgtgggcggtgttcggggttgacgatggttgcaacgatgttaccgccgaatgccggacggatctggtacaacaggttcttataaacttttccttctttcttatcttcgtggtcaccgatttcaagggatgtacagtcggcagtcaaaccgctggtcaaagccgaagaaacacgcgggccgaggtcacggccgataacggtagcgcccatcagacagatttgcggctgttcttctttgaagaggtttacgaggatggaagtgtgaggaagtgaagtataaggataaagtccttcagcgtcgaaaacgtggagtttgtctactccataaggaaggatttgcttttcaatttctttgaggccggtgccggcaactactgcttcgagttggcagttgagttcgttagccaacgaacgaccttttgtcagaagttccaggctgacgtctgcgacgatgccttcttctatttcgcaatatacaaataagttattcatgattatccgatggtatggttagctaacagttcaacaatcagttcttccacatcacggtcgctgccgctgatggttttgctctctttggcctggaacacgatgttctggatggcttttactttcgtaggcgaaccggacagaccgcattgggcgaggtcgccgttaacgtcggctacgctccattcgggcaggttgaggtaatcgcgcttgtcatacaggtcggtatagtcgaggttaccttgttgtttttccgtaacggttttggcgtgtttgtacttctgtaccagcttggcgttacgcgggcggcagggagcagccgagccgttgactgtgataacgatgggcaacggaccttctactgtttcaacgccgccgtcgatgtgacgtttcactttgattttgccgtcacctacttccagaatctcttcagcgtatgtgatttgcgtcaaaccaagtttttctgccacctgcggacctacctgtgccgtatcaccgtcgatagcctgacgaccgccgattataatgtcgcactcaccaattttgcggatagcagttgccaaagcgtagcttgtagccagcgtatctgcaccggcaaaagcgcggtcagtcagcaaataaccattatcggcaccacggaaaagtccttcacgaataatatcagcagcgcgtcccggtcccattgtcagaatggttacggtagagcctgggtgagcatctttcagacgaagagcttgctcaagggcattcaggtcttcggggttgaagatggcagggagtgccgcacggttaatagttccgtcggctttcatggcatctttcccaacgttacgtgtgtcgggaacttgttttgccaatacaacaattttcaaactcatgctattaattttagtattagtatttctacacattagcagccagtagtcaagtagtaataatcttgctatccaaactatccggttaactatcagcgtgcaaatttactcaaacacttggttctgacaagaaaaccgagtaaaaaatgcacattattaagttttttgagcaaataagggcaagtttatgaggttagccatagtcctatggcagtttgggggagaagggggatgggaatggggaaaagagacactaccataggaattgttttttataaaaacatctgtcaccgtcaccgttcgaagggtaactgtctgactataaatgattcatctggtgacagcaagtggtgacagcagtgtgacggaagaagttgccgtcacaacgtgataggagggacaacggataaaaagcaggtaaagtaacaagggatggcggctcttgtttttattctatatacaggcgatttcaggaatgccttagtctagttggtttccatgcgatgaaactatagttccaaagccttgaaaccaatggttccaacgccttgaaactaatggttccaagctgcagaaactttagttccaagccgcagaaactaaagtttcaagctgcagaaactctggtttcaaggtgatgaaactgtagtttcaagcggtggaaactactgaaagctatatatgcttgggttataaggtaaggccgactacaaagtatacttgctcttcataaggattggcgatcacttttccgaagatcggcaaagagaaagtagaggtaatctttagttctttggtggccgaaagtccgatgttgacaacgttgaatttatcggaatacatgccgtcccaaggggtaaagcctgcttcaagggcaaggtccaccttctttatactgaacggataactgagttcgcagtaactggaccacgcacgtttcccgttttcgcggtaatcattccccgcaaatgtggtgtaccagctgactgaaagcgggaacttttcactaatcatatatccggcaccgacttcaaaagtatgtccggtggagtgtgaactgtaattgaagtacttgaaaggttcttcttctgtttgcgtgaagtagttgttggcgtataaggtcagattcctgtattcgtattccaatgacaaatctatttcattattcttatggcgaaattcggtcgacccccagacgtaggcggtcagtcctttccagttgacgcccaatgacggttgtacgctggcgttaccgctgtccatacctctccaaatgtagctgctgacaaaatccgctgttacaaaaacatcctgtgcctgtgctaaaacggaacaaaataagagtgcaataagtaaaattcgttttttcattttgatgactttgttgtattcgggcggcaaagatacgaattgttgacgaatctgaaaggacccggaaacagaaaaagcattcggacaggtggttaaacgggaagagtaaccaccattttgcagccggaagtatagccggtatctattctgatttgccctccgagccgttgtatgatgatgcggcagatgtacaggccaagtccggtgcccggtttgaagtcatctactttggtgaaacgttcgaacacccattcctgcttgtcggcagggatgccgatgcccgtatcggtgacggagatcaccagttgtcctttttctttgtcgatgttgcaggtcagcgtgattgttccgctttctgtaaacttggcggagttacttagtaaattgccaatcacacgggagagataaaaggcgtttgtctgtgccgtcattccgtctttatcgcctgtgatgatacattcgatattcggcttggacagagtttccttaagtttggccatttcttcaacacatagtccgtatacgtcggtagactccacaggaagaggtagttcggagctgacaagctgagacagctccagcatattgtccatcaaagaagctaacgcggtagaattgctttgtatcaactgccggaattcttgtctggtggccgtgtctaaagattcatcgaagatcagttcggagaatccggcgattgaattgagcggagtacgtatttcatgacagatagagttgaggaaagccgttttcatcttctcgctttcggtggctttcatgctttgttttctgacttcttcgtgcgcagtcattagtgcgcagtgcattttcttcagccgttttaccatcgttcgctgatagatgctccatccgattgctgccagtaataagataaaagtaccggtcagtgcgatttgtttgtttttgttggcgagtttgctcttttccagttccagtttgttgacgtcgaagcgggtttgcatttcgatcatttgttgctctcttttttgtgatttatccgacatccggttcttattgctttcttttaaagtcagatatgcgtttttataatcattcagtttatagtacagaccggctttcgcattgagtatgggaacgaggttgactggttggaaatggtctgtttgagtggcggaatcaatgtaagctatcgcctttttgtattcgcctattgtctgataatatcttgctgtcgtctcgtaagtgctttttacaaccttctttttatttgctatctggatatatttctgataatagtcctttatctcttctttcgaaataagatctgccatgaaaataatctgcgaatatttagccatgtagtaatgtgattcgtccagaaatcttcggtcgaaagtcgtattcagatgattccattgcttgtgtagctcgatcattttgttcacttcgtctactgccttcttgttttcaacagttgtatacaagtctgccagttcgtagtggcacaatatttcgaagtgcaccctgtcttgcaaaggataaggggctagtatctccagtgcgcgctctacgtaaggaatggctttggaaacttcattgtatgaatgtgtcagtaccgctgaataatcgagtgatactccggtcagatattcccattgaatttgttcttcaggtgtcatttgtccgtgattttcctttttcagcttgtccagttcctgttcgattgtttccagcgaattgttctttcgcatttccgcccagatgttgtaacaatacaagtaataccggaaaagggtgttgtgttcttccggcagatattgtcgggcgaaggttatatacttttctaccttctctttgtttttggaagcatatcgttgtatcagattatcgagtgcgagcttcatcatatattcgtctttggcttttgcggcctcggtgagggctttgtcccaatattgggaggaaatgttgaggctgtctacgtggatatccgccagatgaatatagataatggcccgttgcctggcatccgtgtcgttttgcaagagattctgcagactgtcgacggaagccgtaacggcggaagcacgtgcgataaagggcgctagcaggatagctccgatgagaaataagaattgtatttttcgtgtgatcagattcttggtcatatgattagatattatttgttttggaataaggatatatgaaagtcagtacgggaccttccggagtattcggttcaatcgtatatgtacctttgaaatattcgattgtcagacggttgatgctatggcgtacttctgctttttgtgtttgcagggtcggatcggctaacggactgttgactacccgaaagacaaatagttcccgttgcgtgtcacgttccagatagagagacactttccttttctcttcacacgggtctgtgtagatcagtgtactgagaatcaattgtgtgaatcgggcggtgtctacctgaaacggctggctttctatttccgtatgaaagtctgcctgtatcttatctccgcatctcatgcgtaccataccgagaacgtccgagcacaaggagatgatttcgtgctcctgtatctgccatttcgttcttccggcctccagtctggagaggtcgagcacgtcgttcaccagttgtatcagttcggcggagttggtctggataatctccgaatattctttccattggtcggcatccatgctttccggatcagtagtcatgagttgagaaaaccctaagacgttattcaacgggatgcgtatgttatagctcatgttaacaaggaagcggctttttacttcgttcgcttcttccgcaatctggctcatcttgcggatttcctcttcttctttcctcaatttcttgcgtacataatagatacgtatggtagacggaatcaggataagcagtgcgatggctatcagagtcagtccggcataatgaaccattgctttgtactgttctttttcaagaagcaggttgtccatgttgcgcatctgatagatttcattcgtctgcgagatggatagtgcccgatagaatgagtcttttttcgccagcaaactttggaataacgggattgcttcatccgcttgtcccgcctctgtaagaatgcttgcatgttctattttgtagttcagcccttcattgtccgatacttcggacaggagttcgatagcattttgagagtatgacagggccttttcgtattctttggtaatccggtaataatgggaatacacattataatataatccccggcaaggaatgtaagtggtaggagagaagtattcatccatctttttcagatgggggcgggcttcgtccagtgtgccttcattcagataatagtcggcatagagagactccaataacaggtagctgtatgctttgggtgtctgctttgcttctgatagtgtgtccagcactttcttgtattcctgcaggtacttcaggaagtttttgtttctagtggcggaacaagataaggctatttcttggagcacgcttttgcgcgattccagggaggcggcgggtggcagaaggcggtaggcttcgaatccggcctcttcgccttctttaaagcgggcggtcatcatataagcagtcatcaggcatagtttggccgatgacattccttggggattgtttaacttttgtgccagtttaaacatctcttcggcttgggtgatgctatattctattttatgctttatgatatgtatggttatttctgctctttttccttcgaagtataagctgtaggagttgttttttaaagcaaccggagagagcttgtccatccagatgactgtgttttcttcgtcttggtggttgaagtaataaacgacatgggcatacagagcaagacactgataatacttgttgtcctgtgtggtagcttcctccaataattttcccagatagtagacacaggagggtgacatcgggtccagataagcgagtgaataaagcatctccagccgggaagaatcggccggcaaagtgtccagtatctgaagcagactgtctttggcagcttcgttattgctggagagagccttgccggttcctcctgccagtacgatcagtatgaagaatatccataaccgtttcatgactgtgcctccttttcttcttttgtggggttgatgggatgggtgaaataaaatctgcatccggtggtgtaggcagggtctatccatatgctgccaccgatccgttcaatgatcagttggcagatagagaggccgagtccggttccctgtgctccttcgtttagtttttcaaagcggttgaaaatggaactttgcttttccagtgggattccgcaaccggtgtcggtgacggagaagagcgcaaattcttccgattcctgacggacttccagcgtgatacttccctgcggggtgaacttcgtggcgttgatcaataggttgatcagtaactgttgcaggcgtgaatcgtcagtgtataactttagggaagccagcgatgtgttgaaacggagctcggcttgtgtctgctttactttgttgacggtatcgattacgttattgcagatggcgatagcgtcacaataggtgaagttgaacttcatgtttccgatctccagattggaaaggtcgattacgtcatttattagttttagcaacaagtcggagttttgctggatgatgtcgccgcattggcggcgtgtttcggcgtcgagtgcctgctcggtcagcagactggagaagccggagagggcactcagcggagtccgtatctcatggctcatgttggagaggaaaagacttttggtctgcatggcattctcggcgttgagtcgtgattgctccatgcggattttggattccgctatcttcttgttttgttttaatatgtgtatcacgaggtaaatcatgatgcccagcactatgactcctattaaaatgccgcccatgaaaatacggttgaactcggctttattctctactttcatccggttttcctcataagatgcccgaaggctgttgatgcggtgtgcatagctgggagcgactaccgaatcggtgacgatactgatttcttcatacagatgcgccgcttctactttactgcccatttctatcagtaagttcgctttggcataagctacttgcaggtagatgatggagcgcgtcttttgccggatgccggtcagaatctcattgtaatactgtaatgcaagattgtagttccctgttgcttcgttatatcgtccttgcatataattgtaggtggtgcgataataaggttgcctgtccgaaaggtagatttgctctgcttgcagcaggcagttgttcgcattgcgcagatcgttcttctggatatagtaagaaacatctgtagcaagtgtcagaaattgcagcgtctgatgggtctgtatggattttgattcggaaagtatctttctgtatttctctgcttcctctgtcctttgagtcagaataagcacctgtataagtttcaggatagtcatttctttataatggttgttctccgaaggcgaggcgggataacggatggcttccttataagaatcgatggcttcttcgggcatattggagcagaaataggcatctccgatagctgcgctcgaaagggctattcctaaatcatatctcatcgtttctgctttttcgtacatttgccgcgcttcgtcgattgctttcccgatgtctccgcgcagggagtagatgtaaaccaccagttgccggatgctgaaagacagttccatcttgttttccttttccagtataggactcagttgctgtccccaggcgataacgctgtctatcggcgcgatggaatcgtacgcaatgttgttttctatcaggcgtttcaaattggacagtcgttcggtattcaggtttactgaatgtgaggggagaatccggataaacagacctatagtaaataatatatagatattcctcttcattaaaagtggtgttttgttgtatgtgttatactagttgccaaaaataagcaaaaatcacaaagaagcggtaggttggcggtgaatatttttctctttgtgttaatatacgttgctgcttgttcgttttattggttctgttgccggccatccgggagctgaggctttattctgtgtggatgtatataaaaaaatctgtcggggaagtctccccgacagatttaaccagtaatctaagtgagtttttcagaatgtgatgtccattttcactacaaaagtacggggagcggctactgccatcgggcggtaactgtattctttattcaacaggttgttgaccatgaattggaaggcgacttctttggtcgcttttaccccgaagcgcaagtcaacggtggcatagtctgtattatgttttttccagtatgtagccagcgtttctcctctcgattttccgaagagaaccgtgcgtacatagtccattaggtcttgttgttgcttttcacgttcatccatcatgagatagtccactgccagtatcttgctcttccatgcaaaattggcgcccaagttgatgcgtttccattgaaaatcgaccgttgctttaaagctgtgcttcggacggtatttcagatacttgcctgtattcgatttttctttcatctgaagagcatcagtgtataaatcttctatttcattacgttctttgtagtcggcatcgcggggctcggtatatacgtatcccagattatagaacagtttcgtgttcttgttgaagtcataaacaccgtttgtcgaaatttccataccgtagatttgcgcttttgatacgttgtggaactgtgctccgatgccaaagcctttgccgtctgtcagcatctggatagcatcgctgatgctgttgatcatgctgtagtctgcattattgaacaggccgaactgaaattcaaccatgtctctgtattcggtatagaatcccgctacgtctacaaacccttgaaagttgcctatcttatatccttgcttgaatcccaattcagcattgtaacctttttccggcttgatgccgaggttcggatagatacccactcctccgatatccttgcgaagatatttctcgttgatggacgggttgcggtaaccttgtccggcactggcgcggataaagctgtaatcggctaactgatagttcagtccggcacggaacaccggacggaacgggactttggccccgaatattttcgtttcggcttcacggtgatgattgttcacacgataatattcggcacgtacacctgccgatacgctcaggcggtcccagaagcgttggtcgtactggaaaaaggcggctacattatcgcttttgtaaacttgatccatgatggaggaattgtagcggacatgttcataagtcattccggtagtgatctgtgcgccgccgtcccatttcttgttgaactggtagtcgagataataattgtagttcttgtccgttttcgtctggacgttgtttcgggttggattcattacgttggacagccagggaatgagatcactgggaacttgtccgttttgtatgctgctcatcaggtcacttggcagtccgttgtccatcacccatgagatgaggtcacaataatcggcggtggtggcgttggggaagatgttgcccaaggaagtgaataccccgttcatggcatcttccagattattgttgatcagaccggagccgatgccgaccaatgccgggtagagcgaactgtaatcgccgcctgctatattctgtatagtctgggcgttcgttcccatattcccaaggatatcagtgatggatgctccctgactgggcttgactatgttgtcggcactatggtagaaacgtcctttgatcttgtgtgacgttccgttttccggattcacatagttgatgaacgggtcgatgtggaagttgttctcttcgcgtcccatgttggtgaaaggagaaggtttgtaaacttctgttggtgatctccagatgaagaaatctccgtattgattagaaagaaagtcaacattcagaccatagttcaatatcttcatactcatgtccggttgatgataagtcagattgccgcccatgcggaaacgtttgttgtatccttgctgccggtatccttcatcggtaaagaggtttatgctgccgctgacatcgaagttaccgatacggcgggagtgggagagatcaaagccctcataaataggatttcgtataccactgagaaggtttccgcgcaggatgggtttgacggaatatttgtcgtccttccagaaactcttgtcactccattggtattcgtcattctcggcatcaccgtatatgccgatataggcactgaagcgggtttttggtgtcaaccccggacgggcggtacggatattgataataccgttgagagcagacgaaccgtacaaaacggatgaggctcccttgatgacttctatctgttcgatgttttctagaggtacggtattccagttgatttctccggtcttgggattcagtgtgctcattccgtctaccagaatctggctgcgggcacctactccgtaagtccatccgctgccgccacgcatggaaggctgtttgtccactatatccacaccgggcagcgtgcggagagtagaagtgatatccgtcggggcctgacgggcgatatcgcccgctttcaccaagtccatggatacggtgacattactgagtttttgctcaaagcgtccggcgcttaccactacctcttccagcagcttggtactttctttcatgtacacgtctttagtgattacttcacgtttgccgataacaatgggcatcagaacgtcttcataaccgatatagctgaacacaaggtcgacacctccctccggaagtttgatttcatacgctccgtttatgtcggacacggttccttgattgccgtgtaatttgtacgttaccgctgcgccaaccaaaggttcattggtattggcgtcatatatatgccctttcaacgtttgggcaaaactagtcccgaatccggcaaggcagatgaataatgtcagaatatatagtttcttcattgtttctgtaatttatgtttttttctggtggaaagtctcattcgtttttgtctgtcaggtcgaatcccaagtccagttgggtgatgatagaccagttatcatacagtggacctatataggaattgtacaacatcggaccgaagttaggaataccttccatcgctggctgaagattggggatgaaggctatgagagggctcagtgcttccctgttcagatagatatgcgtatgtccgttctccttttctatctgcatggggatgccttcctttatccacgagaagaacatctgaaaactttggtgatccatattggcgatcatagataataaagagttatccaatgattcgctcacaattcccagtagagtcttcagtaagaaaggattagatttcaggatagcatctgcaatgcctgctatcagatgagcatcgaccgtctgtccctgcccttgcatggtcaggctgataatacccggaaggttcagtttgacatagagaaggtcatttttcagataccagaaagccagtccccggggagactttgcataattgcgtccctgagttgcgtcagtaatgtcatcggcagacaatgtattgaacattaacttcatcatgatgaaattaatgagttgttgctgggatgcgggattatccatgtcgatttcgctgaacttctgttcccccaattgcagttcgtccgatgtatattcggccgtaatgtttccgtcggattccaaagtgacacttttgagtaattgcggtaagaggtatcctcccatgccttttataataacggatacggttgcgtacaaacttcccgcatcctttaccatctctaaatccatgtcggtatagagggctgctgtcagtatctgattgtccgactctccccattcatattcgccggttgtctgattgcgtacgacatcttttcctctgccgcgtgtcagttcgctcatctgataagtttttatccattgattttgcggcatcgttacattcaaatccagtttcatcgttttcggagtaatggagccggcgtatttcacagttgctcccgcgcacgaaactgtttctccgctgaacgtatagttgtcttcctgctctgataagtttatccggaatgatgtctctttttctcccggaatgatatcgtttaatgtcaatgttccttttttactgtcttccgtctgaaagttgacggtttttccgattaacttttctccgctgtaggtcaggtccagagtggatggtttgatatacgagccatattcctggctgagttctcccggccagaacagcttgtcattgtaggtttcttcgcaagatgtaaggaagaatgttgtacaagctacataaaatagttttcgtaatgttttcattctcttttttgtttttatttcaacgtatttattaaaacattgcaaatgtcggttaatattgtttctacatcaagctctattcttggtattcgatgttctattttaactattttatatgcacgtgtatttgaatagataactgtaatgttctcttttaaataatagatgttctgtttttcatattttaataaagaacttggaggaaattcgaatggaaaaagatatctttgtggaactaaatttcttaattatgatcatagatgatgctcttcccaagtttgaccttccggtcgattttgttacagatgacagcataaccggcgatattctgaatcaatacggtcgttttccctgccatataaaggcgggagtctttgttctttgcacgcggggaactgtacgtgccactatcaacctgtccgagtataccattacccataatgactttgtgactgtcctccccggatcattcatacagattcacgaagtatcttcggatacccgtgtttgctttgcgggcttttcttcggaatttatctcccgtgtgagttatgtagagacctatctggattttctccctatgattttggataaccctattatggcattacaggaagaggtagcgcaattataccgaaacgctttcagcctgcttatccgtgcctattctttaccgaacacactggataacaaagaaatattaatgtctatttttactatattctttcagggggtgggtgagttgtataaacgctgtaagccgactaccaacgaacctatcaagcgggaacatgaactttatcgccagtttatccagttgctgatgactcactatacgcaggaacacgaagtttctttttatgcgaagaagtgcggagtaactccggctcatttttccggtgctatccgtaaggccagcggacatagccctttggcgattatcacgggaattattatcatgaatgccaaggcacaattgaagtcaacccgattgccggtgaaggaaattgctttttcattaggatttaataatctttctttttttaataaatatttccgtaaacatgtggaaatgactccacaggaatatcgggaatgctaatggatgacggtggtcagaccgatgatggatggggatgctccggaggatggtaaaacagcagtttaccgttgaaataagtcctttggtcgattatatttgtggagaagaagtaacggttctatctttgtatcagtaatttggaacaatgaagcatggaaagactgcgtaaacaacaattgctggagcagagcatttatggggctatctggactgttatttttcttctcccactgataggcggatactttgccgtcagtggtggactcgaaaaagaagaaatccgtgtaattgttcatgattcgtggttgagcatccttccttttttcgtcttgtttctgttgaataattatggattagttccgtatttcctgtttaagaaaaagtactggtattatattatttctttggtttttctaatctctactgcttgttgggttattcctgatccttctatggagcgttttccaaaggaattcagatatggcgatcttcgcaagggtaaaggaaaaatccagagagaccagattattaagatgagagagaaggctcggcaggaagagtctgttcattgggaaacgcctagggcaaacgatccggctttggaaaaaatgcaacgaccggtcggcttccctaaactgaccctttatcccattcctcccttcaccatccgttaccttattcattgtgtaattgcctttttgatggtaggatttaatattgccgtcaaactgttttttaaatcctttcgtgatgaggaaatgctgaaagaactggagcatcagcgtttacagtctgaattgcaatatctgaagtatcagataaacccgcatttctttatgaatacactgaataatatccatgcactagtggatattgatacgggaaaggctaagagtacgattgtagaactttctaaactcatgcgctatgtgctttatgaggccagtaataaaaccattctgctttcgcgcgaggttcagtttctggagaattatgttactttgatgagtttgcgctatcctgagaaagtttctattgaaaagaatttccctctcgaagtgcccgaagttcaaattcctcctttactttttatttcttttgtggagaatgcctttaaacatggagtgagctacaggaaagagtcatttgttcatgttgtgatgcaactggaagaaggaaaccgtcttgctttcagatgtaccaatagcacggggacttcgtctgacgagcaacatcacggcatcggtctggagaatatacgcaaacggttgcggttgttgtttggtaatgattacaccctctccattactgaggaatatgataaatttgatgtattacttattatacctttattataatgaaatgtatagcgattgatgacgagcctttggcattgaagcaattaacggattatatatcctgtgtccctttcctatctttagtcaagtcctgtcaggatgcttttgaggcgatgaaggtgttggcagacgaagatatagacctgatatttgtggatatcaatatgcccgatttgaatggactggattttatccgctctttaatcagccgtccgatggtgatctttactactgcttattctgaatatgcggtagacggtttcaaactggatgctgtcgattatttattgaagccgtttgaatttcaggatttgctgaaagcagcggataaggcacgaaaacagtacgaataccgaatgttggaacagcagggagaactgggaaatagttcgcagatcaaaggagattccttgtttgtaaagagtgactacaaagtggtgcgcattgatgtgaaaaatatccggtatattgaagggatgagcgaatacgtgcgtatctttatagaaggagaagataaaccggtcataacccttgccagtcttcaaaaaatggaggaacggcttccaacgtattttatgcgggtacatcgttcttacattgtcaatctgcgtaggataactgaagtttcccggcttcgtatcatctttgataaaaatacatatattcctgttggtgataattataaggagagatttgcggagcatatcagcaagctgagtttctcttaagtatttggctgtttacagtatagaagagaacatcattaaacataaaagctccggaagtcatcttaacttccggagcttttatgtttaaataagagtgaatctttatttgatacctagtttctttgcaatttctttaggaagtgcatctttgtgcaccaggatattcattgttttgtaagcaacgaatgctttggatgcataccagatacctttgtacttaccacttgtaccccaagagttctttaccatgaagtattcttttccgttctggtctttggcgataccgtagattaccattccgtggtcatctgtagtttcccagttgtcgaaagcagtctggcgcatttcctgagtgatttccatttccggaagcggtttggaagtcagttctttgcgtttatcggcagcagtcagacctgtccagcgagccatatccgagccggtaagttctgcacctttggcagcatccggcattacggcaacaccgtcacgggtgaaaccttgttcgctgacgtcactaccccatgcgaatgtatatccttgctttacagcgttgtccattacagccatgaactcgtcaagcggaagattgtaggacagaccattacgccagttgtcctgaatctcgatagcgaattgagaatagaaaggatggtgtgtatatgaagtcagtgatacataatcttcagctttcagtccgagtgattcagcgaaagtcttcggagtatattccttgcctttgtaagtgaagttctccgggcacgctcccaaataagtatcgtagatggcgctaaggcctttcttccataccggagtcagtttagtaagtttacctttggcgattgcattgatgtatccttctgcaacagcgtccagttcattgtgtaccggcagtgtatcaccatacatgatacccggcattgcttcttgcggaaccagtccataattcttcatacagtagatgatgtcatagaaacttccgccgggagagaaagaactgtcgccatgatagcgtacatagtttgttccgcggtcttccattgttttgtgtacaacgaacatttccgaaaggtcgtattcgcctttacccaaacgtagtagttctgattccaggaatcccaaagcggagaaactccagcaagtacttgaacgattctggttcttgatagaagtaatcggattttctttcactgttgtgaaaacgaagccctcttcgggttttgcgtcttgtgccattgcgctcaggctgaacaagcctaaggcagcgataaggatactctttttcattctgatgaaattaatattaaattgttttggttacaaagatatggattccttgggggaattccatattcttgcatagattttgcataaaaaaagagtagaaaatgctgtatcccaccttctctactatacaaaaagaggaaaaggcaatcgtatgtgatcaccttttcctctttctacatttattttattttgattccgagactttctaaatcatcgagagtaacagtataattctctctgcttttcatccgtttcattactaactgtccgacttgttcggcatcccttttctccatgaaaggttttttaccggaaatacagggtatgaaaggctgaaaaatcgttatatgattgttgtgagatatttgatagccatatcctccgtttacctcaatcacttccattgaaaaagaaggatcagaagaatctgtattagaaaaagatgctttggaaaaagacagacaagcgattactgtcaatattcctgcaacagagcatccgagtatctttttcttagtcattctcttcccattcatatggatgtaactcccatgtatcgtcataataatagctgctactgcctccggtagtgataatacctcgtctgccggtagcgaaacaaaccgctttgatgcgtgaacttcctttgaaaggagtgtagtcaaaaccatcttccgtttcactgctgcgccataagtctttagcaggatcgtatatccagtaattacttcggaagctaccggaggctgtttgtcctaaagtgatatatgcctgatcgtctataataaaagcacagccgtaggtgcgggtgattgatttgtaatcgtcatcgtagtcgtcactgctctggtctgtaatgtcacggagacgtacccatttgttctcttcacttttgctgggatcgaacttccagaagtcatcgacatccttaccattgtttgttcctccgacaatgtaggcgacattatcgataataaaggagagtccgccggttcttttctgaccgccgaatccgttgacgatagtccattggctgccggaagcggctgtcggatcaaagcggtaaaagtccttggtctgtttatcatctttagactgaccggtgcctacataaccgtaattaccgatagcgaaggctatggcgttgattcgggcatctccggggtagtcatccatctgtttccaggtgtccgttgccggttcatattcccatgtatcttttaaatatgcatatcctccggtatgtagtggatcgtcatctctgtatacggtatatcccgtagtcacatatcctttggagttgatcgcaaatccgacagccccgttccgggccgccgcctcttcgggaaggtcggcacattgcgtccaccagtcgttatcgatattatattcccaacagtctctttcccgctggtcttttccccgatatccaccgcacaaatatccccggttatctatcacaaatccggctgcgtcctcccttgcccttccgtcgaaatcagaacggcgataccacacacctaatgtgtcgtcatcatcatctgaacatgagaacatggatagcatagctattgatactaataacagttgtagttttttcattatttccattcgttttattacgttttaaacttggggcaaatgtagctatcaatgcggttgaagaaaaaagatatcgacaaatagccctattttctctatcgaacaaaaccgagtctataaatagcgggaaatagtcgattaattttggggatgctttcctaaaggggttcctttgcaactcaaaaataatattcattatgagactattaattacacttttttattcattactcttattttgtacaatattctcctgtagggatgaatcttcttccattggaagtaaatgggtagagagttcttttataaatgtagtgacagatacgtgtatggtgactctgagcacattattagccgactcgctggcaacttcgggagatacgatctgccagatcgggcgatttaaggatgctctttacggagaaataaaaacttcgttttatgcagaatatcaagtaccttctcactcacttaatgagactactgactatcagtttgactctatcacgttcaaatggtatacttccggggattatctgggggatacgctggtctatcatcgtattgacttatatagtttatcgcaaggactctctctggaagataacggttacctgtttaataagaccaacgttagctataatcagaataatcatcttggttctgtttctatacgtcctacacccggctatcggaacgagttgcatgaaacgcgcctgcctgacgaatggggaaagaagtggtttaatttaatgctggaagatgatgaatgtatggagtctcaggatcgtttccgggctttcttcaaaggaatagcttttattcccgatgaaaacgggacgtgcattaacggctttcaggtgaacgattcgagtttttgtattaccctttattatcatgaactgaaagagaagcctacggaacagaccttagtgttcaatgccagcacttcactgaactacaccaaggtggaacatgaccgtactaatactcctttggagaatctcaaggcaggaacagattatgaactgccttcttccgagagcgaacatcaggtgtatctgcaagggctgaccggtatgtatatcaatgtcgaatttccctatctgaataatctgaatcagaccggaaggcttgtttccattgaaagtgcagtactcaagctatatcctatcaagggtacgtataacggcaagtatccattgccgaaatcgttgtctctctatacggcagaccagaataacgccactcagagtgtcattactgatatctcgggaaataccgtacaaacgggaagcctggtggaagataatgtctattatgaagatactcactattcgtttgatatcacctcgtttattcagaataatctggggacagcgggggagagccgtgagaaactgcaaatattcctctctgacaatgctttttataataccgttcagggagtggtgctgggagatagcaaacaccctgtgaatgaccatgataataatgtatcactcactatttattataagacatatacgaaatgaaaagaagagttttatctatccttatactaggtgcgaacttattgaatgtagctgcccaaaatatgacgagttcgccggtttccatgttcggactcggcgaattgtccaccggagaaggcggaatttattccggtttgggtggagtcggcattgcattgcgtggagaaaatgtgattaatagtgccaatccggcttctttaacgggattattgccgcagtatttctttttcgatttgggtgtcagcgggtcttatctgaaatattcacagtcaggagcgagcaatcattctctgaatggtaatcttaataatttggctgttggattccgtatagctccccgttggtatggagctatttttatggctcctgtcagtagtgtagggtatgccatatcgctcgatcaggatgtggcgggtacggacggaagtacggtgacttcactttttcaaggtgagggaggggtatccaaaatgggcatcagtgttgcgcacgaactgtggaaagggctttcactgggtgcaaacttttcttatgtgggaggaagtatttcacaaacagaaactcaagggagtgcaacagaaagtaatagttcgcataaacatacgatttatgccgatttcggattacagtatacctataagctggatcattaccgttcggtggtggcaggagtcgtatatggatattctcaagacttgatgcaggataatgatcatgcggtaagcagtagcagttccagcggaaacattgaagaaaaaggaaaaaagtatcgcacttgtttgccgcagtttatcggcttcggagcgtcttatactacgttgcgctggatggcttccatcgactataaatttgttgactggagccggctggagtcttcgcattccagtataagttttcgtaatcaacatcgtttgatgctgggaggcagctatacattgggaaatccttatagtaaaccggtacgtttattgctaggagcaggtatgggcaactcatatatttcagtgcatgataagacgacaacgaattattatctgagtaccggacttaattttgagtttcgtagccgcagtacgctttctttaggagtgaaatatacagatcaactgaaggtgaattcggggagatttaaagagcagaaactttctttttttctgaatctgactttctcggaaaagacttataaggcaaaattgaagtaactggcggggtactttctttatctggcggggtagggagagcattcataatatagaaaagggtaccaccaacggtacccttttctattatttattgccttttggtgtcactacatagtcttcttttataaactcatcataaacccgtttaggatgatcgaatgctgcggttccattcctctgttcgttgaagttttcccggcggaattgtttcagcttcaggttgtcttcggcatattctcttaacttcttatgttcacgtccataaagtgaactttcagtaacatcagaatcaagcaggctttctttaggagtgatggtgggcaggagcacttgttccaatagtccacgataggcaccgttatattcgcaccagacaagatcgttggcaacgaatatacgatagaagtactttgaccatgcggttttaatttcgatggattgagcgtaaatctcaatcgttgcttctgaaccatacgcttggtctcggatcacgacggtcgtccgaccgctgatttcttccttcacggaagtttgccatttgtcggaatgcaggatttcctcaatgagttccggcaacttttctttaatttcaaactgtattctcatggtgcttgcctgcgggcaggactttttttgaatttcctacttaaaacaattaagctagcctaaagttacatagattgaagcaaaaaaacaagattttgtttgaatatttactatttttgccaaactatctgcctttttcgtttgtttttattataattatgcaacaaatagcaaaaaaacaagtttatgcagaataaagcccggaagaattacatcatttatgtacttatgctccttctgtttggagggttgatttatgtcgctattgaagagggcgacaggttttcacatcacgctgcgaatacgttaaacacggtacaagacgggccttttgccatgtttctacaatttatgcaagataatctgcatcatccgctgactacgttacttattcagattattgccgtgttgttgatggtgcgtcttttcggctatttgtttagtcttatcgggcagccgggagtgattggagaaatcgtagccggtattgtcttggggccttctgttttgggactttttttcccggaagcttttcatttcctgttccctgtccattcactgaccaatcttgaattgctgagtcaggtcgggctgatccttttcatgttcgttatcggtatggaactggactttagtgtgctgaaaaataagataaatgaaacgctggtgatcagtcatgccggtattttagtacctttctttctgggtatcctgtcttcttattggatttacgaaacgtatgccgccgatcatactccctttctgccttttgccttgtttataggcatttccatgagtattaccgctttccccgtgctggcgcgtatcattcaggaacgaaatatgaccaaaactcctttggggactcttgcgattgcttctgctgccaatgatgatgtgactgcctggtgtttgctggctgttgttattgctatttcaaaggcgggtagctttgccagtgctctctattctgtgggattggctatggcgtatattgcagtcatgtttttggttgtgcgtccgtttctgaaaaaggtgggagaggtgtatgccaataaggaggcgatcaataaaacgtttgtggcatttatcctgttgattctgatcatttcttcctgtctgacagagattatcggtattcatgctttgttcggagcgttcatggcaggagtggtgatgccgtcgaatctgggtttccgaaaagtgatgatggaaaaggtggaagacatttctttggttttcttcctgccgttattctttgctttcacaggtttgcgtacggagataggtctgatcaacagtccggagttatggatggtgtgtttgttgctggtgacagtggccatagtcggtaagctcggtggctgtgccatagctgcccgtctggtaggtgagtcatggaaggatagtctgacagtgggtaccttaatgaatacgcgcggattgatggagttggtggcattgaatattggttacgaaatgggagttcttcccccgtctattttcgtaattttggtcattatggcgctagttacaacctttatgaccactccgctgctacatttagtcgaacgtttctttgtacatcgggaagaaaagttatctttgaagcgcaaacttatattttgttttggtcgcccggagtccgggcgcagtctgctttccatttatgatttgttattcgggaagcagttgaagaaagaacatgtgattgcagcgcattatacagtgggtacggatttgaatccgttggatgcccagcattatgaaagcgaaagctttgctttactcaaccaaagagctgtcgaactgaatattcaggtggacaatcactatcgggtgacggataagctggtacaggaaatgattcattttattcgcaaagagcatcctgatatgttgcttttaggagccggtagccattaccgtcccgaaatgccgggaactccgggagctattttatggctgacgctcttccgtgataagattgatgacataatggaacaggtgaaatgtcctgttgccgtatttgtgaatcgtaattatcgggaaggagcactggttagttttgttttgggaggaatgattgatgtattcctgctttcgtatctgaatataatgttgcaaaatggtcattcggtgcgccttttcctttttgaaacggacgatgaagagtttcatcagtgcatagatgacttgttggctcattatgctgatcagatagtagtggtatggtttgcaggagtagaagaattagtaaccaaagagagagatggattgctggtaatgagccatctttcctatacaaaattatccgaggatgagcttgtgatgcgggaattgtcatcattgctggttatccgtcggaataagaataagggagaaaaaaatgaaagacttgaaattggatgagcatacggggttagtacttgaaggaggcggaatgcggggagtattcacttgtggggtacttgactatttaatggatcatgatattcgttttccttatgcgatcggggtatcggcaggagcctgtaatggcttgtcgtatgcatcccgccagcgtggtcgtgccaagttcagcaatattgacctgctggagaaatacaattatatcggcctgaaacatctgctcaggaagcgtaacattctcgactttgatttacttttcaacgaatttcccgaacatattcttccttatgattatgatacatactttgcttctcccgaacgtttcgtgatggtaaccacgaattgtatgacaggagaagccaactattttgaagagaaacgggataaaagccgtgtgattgatattgtccgggcatccagtagcctgccttttgtttgtcctgtcacttatgtggatggtgttccgatgcttgatgggggcattgtagactctattcccttgcagagagctattgcggacggttacacccgtaatgtggttgtacttacccgtaatcgcggttaccggaaagacacgaaagatatccgtattccatcctttgtctaccggaaatatccgaagttgcgtgaggcattgagtcgtcggtgtgcagtttacaatgaacagctggaaatggtggaacagatggaagatgaaggaaagatcatcgtcatccgtccgcagaaaccggtgatggtggaccggattgaacgggatgtacagaaactgacgggattttatgaggaaggatacgattgcgcaagaaatctgttcgaattttaagtaaataatgtgaatcagcagttgaaccaaaactgcacaggaatgaactaaacagtagtacacaatagtaacggggctgactaaaaagtctctccttgatattttctttgttctccttcttatgtgcaatattccttatttcataaaaagtctcccttttatggggactttttattgtatcaatcgccttgtttcctccccctaagctcttcatgcaacctccttggcattaggcccattcatttttcttaaattatgggctattgcgataataatacattctgtttctactttttgtagtcccctcaaatgaactctgcggaacaacatattttgttttatgtctccaaaacatgtttcaatatcatgtgcccgatttttcattagcctttttccttcatccgttagtagtctccggcgtatttgttgcttgtactcctccagtttttgatttatttgtatcgttctgttgttcccctgttgccgtttatttccgcattgcccagctaatgggcacccggcacaatcccggcattcatagtttcgcaatgtagagacaaatccattcttgtttgtaaccttcacttcacctgtataaatcaattgtttattgttggggcatagaaaagtatccttgtctttatcatagggcatgttttctttatagaaaggactctctctaaattccttggtctgttccttatcgtaggaagggtatttcagcagagcctccatcttctctgcatccagaaattcatagttttcttccgtaccaaaaatagcgtcagcaatgacctgttgcggtttccctggcagaagaggcataacctgctccatgtgagccttaaagcaggtgccgtcattagagttctgatggacactgactcccgtaatatactgcttttcggaaccgaccatgccattataagcgggacggaggtcttcctggcattctttggttcgcataggggtagcttggggatctgttctactgtatccactacggtcaccacagatttgtttctgttcttcatagattctcttgcgtaaaccagcctcttctaattcattttttagacgggaagcagcacgggatttcttactcttgggcgttttatccttattgatgatagcattcagttgggatatggattcctcaatacggtctttacgaccggcatcggatttgccaaggagttccaggtcatcctcgccatactgctcgttttcctctttaacaagtttgtcgatttcaagcaacgtagagtctatgcgtgcttccactccttcaagatagcgggaaggatttttcttccagacaaccttgtgcttgttggcatcagcctgaatagtagtaccatcgcaataatattcttccagacgaatataaccttcattaaacaggagaagaagcagagaggcaaatacagtatggatactatctttcagacgaccgctgcggaaattgttgatagtgcggaaatccggatattgtttgcctgaaagccacataaaggtgatgtctgaacgaagagcattggcgatcttacgaccggtatagagtttgaggcaataagcatacaaaagaactttcagaagcatacggggatggtaggcagtagtaccgccaccgcagtaagtggataaaagaaacgtcaggtcgagctgattaaccgtatggttgaccacacgaacaaggtgattatcgctgattgttaagtctaaacggtcggggaataataaaatttcaccctcattatattgtttaaattgaactttttgcatatctttgactaagtatattttatgcgtttggtagcctaaatatacataaaagttctctcatatcagtggatagagagaactttttttcgagggggagctttttagtcaaccccaatagagatagaatcgactttttagtcacccccagatagaaccgactatcatttagctcataacaatacgaaaacgaacaaaatccaactactgattcgcataaataataaatgacctgttttgctggtattctgcatgaagaatgcggactatatctgtgatatttatatatttctgtataatatttctacaaatactcttctttttcttcaattaatccgattttaagtcattattaattcgtttttgtggtatttattaagggatgcccctttactttgctgaaaaatattttttggcagacttaataacataacatgaaaaataaaagaataacatggtaaaaaggtttgattggttgttggtgtgtttattgttttcaataggggtgatggcacaatccggcgggaaacagtataattcttacaaaggattggtcatggcaggttatcaggggtggttcaacacccctggtgacggctcgggccgtggttggcatcattataatggacgtaatggttttcggccggggtcatgctcggtagacctttggcctgaagtgtcggagtataagaagctctataagactgagttttcctttgctgacggtaaaccggcttatgttttttcttctcatgatgaatctacggtagatgtacatttcaaatggatgcaggagtatggactggacggagtatttatgcaacgttttattacggagatacggaacgaaagcggattgaaacactttaataaggtgttgaattcagcaatgaaatctgctaataaatacgaacgggctatctgcgtgatgtacgacctgagcggcatgcaaccgggagaagagcagttattgctgaaagacatagcagaaatagcagagtgctattctttaaaagaccatgcaaagaacccctcttatctgtatcacaatggtaaaccgctggttacggtttggggagtcggatttaatgataatcgtcgctatgggctgaaagaagccgctcatattattgacggcttgaagtcacagggattcagtgtgatgcttggagtacctacgcagtggcgtacactgaatggagacacagaatcggatccccgcctgcatgagcttatccgaaaatgtgatatcatgatgccttggtttgtagggcgttataatgaaacgacttatcccaagtatcagaaactggtggaagaagatattcagtgggcaaaaaagaatcaggtagattatgctccgctggttttccccggtttctcatggggaaatctgaaggggaaagatcataattcatttattccccgcaataaaggctctttcctttggacacaattgatgggagccattcgggcgggtgctgaaatgatctacgtggctatgtttgatgaaatagatgaagggacggccatctttaaatgtgctaagaaggtgcccgtaggtaaaagtacatttgtaccccttgaagaaggtgtggaaagtgatcattatttgaaattggtgggagaagccgctaagattttaagaaaggaaaaagctgtggcatttagtacaaagctggatacgaaaagtccgaatccttttatccggcatatgtataccgctgacccgtcagcgcatgtctgggaagatggcagattgtatgtgtacgcttctcatgacattgctcctccgcgcggatgcgacttgatggaccgctatcatgtattctcgactgatgatatgattaactggacggatcatggagaaatcctgagttccgaccaggtgccgtggggacggaaagaaggaggttttatgtgggctccggattgtgcttacagaaacggcacctactatttctacttccctcatcctagtgaaacagactggaatgatagctggaagatcggtgtagctaccagtgacaagcctgcggaaggattcaaagtacagggatatattgagggaatggacccgatgatcgatccttgtgtatttgtggacgatgacggacaggcctatatctacaatggtggcggtggtacctgcaaaggtggcaaactgaaagataatatgatagaactggatggccccatgcggactatggagggactctcagacttccacgaagcgacctggatacataagtataacggaaaatattacttgtcttattctgataatcacgacgacggagaaaaacataaccgaatgtgttatgccatcagtgattcacctctggggccttgggaatacaagggtatttatatggaacccactgatagttataccaatcacggctctattgtcgaattcaaggggcaatggtattctttctatcacaacagtgcattgtccggtcatgattggctgcgctctatctgtgtggacaaactgtactacaatccggacggcactataaaaatggtgaagcagactaaataacagatagatcgatacacaggcaattaataaatagaatccttataatagttgaaaaacgaatatagcatgaaaaacaaaatgaaatggatattggcagtaggattattgtcatgttcggtagcaatggcacagcaacagagtgatatattatcggtatctgcttctgcaaatgcagaaaatgctgctttagcctttgacaggaatgtaaaaacgatgtggacaatcccttctcaggcactaaaggctgaacaatggctgatgtttaccattcagcagcccggagatgtttgtgaactggaccttcagatgcagggtatcaataagaatgaactgaaagaagtactggatatctttgtcacttatgaccccatgaatctgggaactcccgtgaactaccggatcgaagggaacgacaaacagatgaaagttaaattcactcctaaatacggtgcacacgtcaagctgaattttaagccgggaaagctggataagcctttctctctgaaagaaatttcagttcttgtggcagaaaaggtattaacggacagtcagggaaaagtaaccgaccgtcggtatatggacgcgtcactgccggtagaagaacgggtggagagtttgttggcagtgatgacgccggaggataaaatggaactgatccgtgaaggatggggtattcccggtattcctcatttgtacgtgcctcctatcacaaaggtagaagcggtgcatggtttctcttatggtagcggtgctactatcttccctcaggctttggcgatgggagctacctggaacaggaagctgacggaagaagtggctatggtgatcggagacgagacagtggctgccaataccaaacaggcatggtcgccggtgttggacgttgcacaggatgcacgttgggggcgctgtgaagaaactttcggagaagaccctgtattggtgtcacaaataggaggtgcatggatcaaaggataccagtccagaggattgtttactactcccaagcatttcggtggacatggtgccccgttgggcggacgtgattcacatgatataggactgtccgaacgtgagatgcgcgagattcatctggttccgttccgttatgcgatccgtaattatgactgccagtctttgatgatggcctattccgactatatgggagttccagttgccaagagcaaagaattactgcatcagatattacgtcaggaatggggattcaatggattcattgtcagtgactgtggcgctatcggaaatctgacagcccgtaaacattacacggcaaaagataagattgaagctgccaatcaggcattggctgccggtattgcaactaattgcggtgatacttacaataataaagaagtgattcaagcagcaaaagacggtcgtatcaatatggaagatctggacaatgtatgccgtacgatgctgggtacgatgttccgcaacgaactttttgaaaagaacccttgcaaaccactggactggaagaaaatatacccgggatggaactcggacagccataaggaaatggcacgtcaggcggcacgtgaatcaattgtaatgctggaaaacaaagacaatcttcttcctttgtcaaagacactgcgtacgattgcggtactgggtcccggtgcagatgacctgcagccgggcgattacactccgaaattgcttccgggacaactgaaatcggtattgacaggtatcaaaggcgcagtaggcaaacagaccaaagttctttatgaacagggatgtgactttaccaatccggacgaaaccaatattccgaaagctgtgaaggcggcttcccaatcagatgtcgtgattatggtattgggtgactgctctaccagtgaagcgaccaatgatgtccgtaagacatgtggagaaaataacgactgggcgactttaatccttccgggcaaacagcaggaattgctggaagctgtctgtgcaacaggaaagccggtgatactgattcttcaggcaggccgtccttatgatattctgaaagcatccgaaatgtgcaaggctatcttggtaaactggttgccgggacaagaaggtggtccggctatggcagatgtactgtttggtgattacaatcctgccggtcgcctgccgatgacattcccgcgtcacgtaggacaacttcctttgtattataacttcaagacttcaggacgccgttacgaatatgtagatatggaatattatcctctttaccgcttcggattcggactcagctacacttcattcgaatattctaatctgaagatacaggaaaaggcgaatggcaatgtggaagttcaggctacagtgaagaacgtaggaagccgtgcgggtgatgaagtcgctcagctatatgtgacggatatgtatgccagtgtgaaaacccgtgttatggaattgaaagactttgcccgtattcatttgcagccgggagaatcgaagactgtttcgtttgaaatgactccatatgatatttcattgctcaatgaccggatggacagagtcgtggaaaaaggggagttcaaaatcatggtaggtggaatgagtcccgattacgtagctaaaaatgaaatcaaacatagtgtaggctatagtgataacaagaaaggcgtcacgggaatgcttaattatacacatgagtttggtgccaatttcgatcttgctgtgtccaaggtagaagagaaccttgtcaagaaccagaagacagtgtgggtgagtgtgaaaaatacaggtacgttgatggatatcggtaaggtggaaatgtttgtggatggtaagaaggtgggagatgccgttcattatgaactgggagcaggcgaagaaaaactgattccgttcaagctggcaaaagagaataagcagcctgtagcgtttacgaccaaatacaagatggtgtctttataagattcctttaatagtaaatgaatgataacttttaccggataagtgatatgtatcagaggcttataacctgttttggactgttactgattgtttccagtctcttcgtaagggcaaccgaaccggttcatgacgtaccggtcaagatacgaatcgctgactttaaggatgccaaggccggtgctgtaagctatacatttgatgatggattgcgcaatcagtatctgattgctgctcccatcatggagaagttgcagataccgggaacattctttgtcattcccggacaggtctcggctacgctgcaggaagctgaggccaagaagccgggtgcatggggaggtgttacctgggaggagatacgtacattggcggctaaaggttttgaaatcggtaatcatgggtacagtcataagaatctggtgactcaggtaaaagaaccggaagaacttgaacatgagatagaaaatagtgccgatatgatccgaaaggaaacgggtattttccccgtttctttttgttacccttacaacagcttcaatgagcaagtcgaaaagatcgtagaaaaacgtcatgtcgtagcccgtacttttcagcaaggcattggagccagagataccacggcagagaatatcaatcaatgggttgataaactgattagccagaggaaatggggcgtagctatgattcacggtttgacagacggatttgatccgcttcgccctgatgttttcgaatctcatctgacttatgcgaagaagcatgaaaaagatctttggatcgatactttcggtactatcggccgatacatcagacagcgtgatgcgaccactatcaaggacgtgaaaatcgattctaattcagtgtcttttattctggattgtaaattaaataaagaacagtttgatattccgctgactctcgttatcttaacggaaaacaaagtaactgaggcgaaggcgaaacaaggaagggaatcccttcctgtcacgatacaggataaacaaataatgattcactgtactcccgattccaaacgggtcacagtgaaatggaaatatagtaatgtagatatagacttataaataaaatgaaacgacttcttttcatatcatggatattcttgttgtccgtaagctttgggctgacaaagatgaaagccgatgtacggatgccgctgatcttcggtgatcacatggtgttgcagcaagacacaaagattgccatctttggatgggctgatgccggagaaaccgtagaggtagtctttgccggacagaaagtgaaaacgactgctgacactgacggaacatggagagtgaacctgaaaccgataaaaacaaagaaagaagggcagactctgacgattgccggtaagaacaaacttgtctactcggatgtgttggtaggcgatgtatgggttgcttccggacaatcgaatatggaatggggaatgaaggtaagaaaagaatatgctgacgatatagtcgcttcggaagatcctttgctgcgtttgttctttgttcccaagaatacgtcgttagagccattgaccgatattgaagttcctcagggaacatctaaccccgaacgggctgccagatgggtactttgtacaccggagatgttggctaagatcaatggacagggcttttcggcaacagcttattactttgcacgtgatatgcgtgctgcaaacggacgcccgttgggagttatccagtccgcatggggaggtacgcgtgcagaagcctggaccagcctttccggattgaaacaagaaccggctttggcacactatgtagctgcgtatgagaagaatgtgaaagataatccggaaatactcgccacttatccacagaagcagaaagaatttgatgaagcggtaagggaatgggataagaccgtaggaaaagaatggaatcaggcacaaaaagaatgggcgatagctgtgcaggcggcacaagcagctggaaagccggctcctcccaaaccacagcccagagttccccgtccgcccaatccgcgtaaaccgaatgggggaaataacggtccgtccaatctgtttaacgcaatgatttctcctttaatccctttgagtataaagggagtcatctggtatcagggagaatttaactccggcggctctggaaaagaatatgctaccctgttctcccggatgattacggattggagagagaaatggggaatcggtgattttcctttcgtatatgtgcagcttcccaatttcgaaccggtagatcccgagccgtctgtcgaaggaaacggctggcgctgggtacgggaaggacagctgaaggccttgaatctgcccaacacggcaatggctgtgacaatcgatgtaggagatcctttcgatttacatccggtagataaatacgatgtcgggcatcggctggctcttgctgcccgaaagctggcgtacggagagaaaattgtcggcatggggcctctttataaaaagatgtctgtgaaaggaaataagatcattctggagtttaccaatcagggtaaaaaactggtgatgggaacttctccgtacattccggcaggaaaaccgcctcatccgaaaccgacgaagctgacaggcttcggcattgcgggagcggaccgtaagtttgtatgggcggatgcggtgattgaaggaaataaggtgattgtgtccagcagtgaagtggctgtacctgtggccgtacgttacggattttccaatagcccccgttgtaacctgtataacgagaaaggcttgccggcatctcctttccgcacggacagctgggataaataatacgaaccggcgaactaataaacagaaaaacaccatgaaaagagctacttccctattaatggcaagcgtattggcaggatgtatcgcttcctgctcatcagagaaacgaatgccccggcatcggattgtaacgaacccgatcaacctgaactatcgtttccagccgaaagacgaatcgcgtcgcgaagccgccgatccggtcttggaatactttaaaggatattactatctgtttgcttccaagtccggaggttactggcgttctgaagatttagcggattgggaatacattccctgcactaccataccgactctggaggattatgctcctaccattcttcctgtcggagatacgctgtactttaccacttccagcggtaaaactcagatattcaagagtgcccatcctgaaaaggatgcgtgggaaccggtagatacgaagctgacttaccggcttcatgatccggctttctatagagacgatgatggaaaggtgtatatgtattggggatgctcgaataaagatcctatcatgggggtggaagtagatccgaaagacggtttccgtgccattggagaagccagagcgttgatcgaacaccacggagataaatatggatgggaagtgcccggaaagaataatgaagagccgcgtcagggatggaatgaaggaccttgtatgctgaaatatgaaggacgttactatttgcagtatgcagctccgggtactcagtatcgcatctatggtgacgggatttatgtaggagataacccgttgggaccttttgaatatatggaagataatccattctcctttaagccgggcggatttatcggtggggcagggcatggccatacctttcaggataagtatggaaactactggcacgtagcatctatgacaatctccgttcgccattcttttgaacggagactgggactttttccggtagcaatctctgcccgcaacggaatgtatgcgcatacagcctggtcggattatcctttctatatacccgataaaaaggtggacttcaataagaccgatctgagtatgggatggaatctgctttctttccggaaacctgtttccgcttcttcctctcttcccggctatgaaccggacaaagccaatgatgaacaaatcgaaacctggtgggccgctcaaaccggaaagaagggagaatggcttcagattgacatggaaactccggtgacggtcaatgcgatacacgtgaactttgccgatcatcattttaaagtatttgcacctcatcctcctgttgtttatcagttcttgatagaaggttcggcagatggaaaggagtggatgaatctcgttgatgaaagagagaataagaaagatgagcctcatcgtcttttcacgctagataagcctgcaaaactcagatatctgcgaatcagtaattcgaaagagctggaaggatgtttttctttgtccggtttccgcatattcggtaagggggaagggactgcaccgtccgcagtgaccggttttcgagcgatacgggatgacagtgaccggagaatttaccgttttacatgggatgctcaggcaggggctaccggatatatcctgcaatggggaacgcagaaagacaagttaacgcattctgtgacggtatacgataatcagtatgaggcccgttacttcaacagggattcggaatattatttctctataaaggcatttaatgagaatggtaattgattgattgaaaggagggttgagcatgaagaaagatagaagcagtatacggagaatcgttttgcagagttttagatgtggtttgttcattgttggcggattactttctgagacgatgacggcacaaaaccgggcagtggtgttcgaccgtgatttctctccggcggaaggcttggttattccacaggaaaagccgtatcgggatgaagtctgcctgaacggattttgggatttacaatgtgttgcagtcccttcttcatggaaaagcggttcgggaatagctccggaactgtctgcccccaaaccggaccagtgggagaaagtaaagatcaaaataccttctgcaatcaatgtgaatgactggggaagaggcagtaaggtcggtgaaggaacacagcgtccgtatgcgccgggatcagtctactttccaagttatccggaacattgggtacatacccgtatgggatggctgcgccgtaacttccggattcctgcggattgggagcaaaagcggattctgcttcacttcgaagctgttgcgggagattgtgtgatacaggtgaatggaaaagaaatttgccggaactttgatgctcatcttccttttgaggcggatattacagcgtatgtgaatcgtgaaggtgagaatgaactgttggttggagtaagagataccaagttattcgacaagtcgcatcccgtctatcagaaaatgggagcgacttatcctaccggttccaatactgattatttattgggtatctggcaggatgtatatatgtttgctgtgcctgagatacggattacggatgtatttgtacaaccgtgggtagataagaatgagttgaaggtagaagtagaattgataaatctctcaccggaaaaggcgagcgtgacattgaatggcgaagtccgggaatgggtgaaccaggcaggaaaggatattctgacagctccggagataaaatggacattggggagcacggcgcttaccatgcctgttactactgtcacgcttcaaaaaggagagaagaagaaagttgttattactcaacatccggatcatcgattgaaattctggactccggatactccggacttatatactctgctgttgaccgtaaacggaaagaagcaggtttatgactgcaaggcaactcgtttcggatggagacagtttaagattgtcggtgatgaatttcagctgaacggaaagaaaatacagtgtttcggagatatccagcatccatttagtgcttatatctgttcgcgacgctttgcttatgcgtggtatcagatgatcaaggactttggtggaaatgcggttcgcccgcacgcgcagccctggccgcgtgtttactatgatctggcagatgaaatgggattgatggtactggatgaaacggctttattcggtagttccattcgtctgaatcttgaagaagacgtaacatggcagcgttcacataagcatttggaacgtctgatcatgcgcgaccgtaaccatccctcggtcataggatggagtgcgggaaatgaaatgtttgctatcgctttattgaataagccgacaaaggaggtcgccgccgtttgggatgacaaactggtggaactgacaggaagtgcccgtcagtttgatccgacccgtgacttcctgacgttggacggtgaccgcgatatggacgggcgtctgcctgtatggagcaaacacttttctcatggtctgaaactggacgatttgcccaaaggactgaataaacctttgatcgtaggtgaatccggggcaacttattacgggcgtcctcaccagctatatccttttgtcggagagaaagcctatttgtcttatgaagggcgcagtgaagcattggcaattgatgtctttcagaatgtgaaacagatggccattccttatctggcatactattctccttcggaagtatgttggttcggcctggagcacatgaatttgggataccatgattttagccgccttccgaatctgtcggatggaatctttgccggcaaaccgtatgaagaaggcaaaccgggatatcaatatgaacgtatccctccttatgtaaccacttttaatccgggattggacaactcgcttcctttatataaaccgcttccgatgtttaatgcactgaaagcggcattgaacggtggcgaatggactgcattcaaagaagtaaaacatcctgtgaaaccggaattaccttcccctgtctatgctgttgcatatttagccggaaaagcgaatccggatttaatccgtttcctgactgaatccggtgtttcattaacagagaatccgggaaaagcaaacctatggatagtagatgcggaacaagtgacagcggcagatttgcaaggattacaatccgctttgaaaaaatggaggaagaagggcggtatgttgctggcattgggcagcggagagaagttgagtgcggacttctgccgatggttgcccgatgaagtcaggctgacgaaacgtaaagccactgctttggagatgaacagaagtacttactggggaaactattttgaacttcccgatctatatttcggtgaaatggaaggagaccgttacatcttgaagcaagggctggcgggagcattggtggaaaaaggcaatgtcatattaaaagcttcccgcacggactggaatttatttaatacttctcccgaacactggaaatgcgctcaggtcgtcttgtatgaagcattacaaaagccggaaggagcagctttaatcacatatccgttgcaggataagacagatttggttctgtcagtcatagattatcgtttgcagacgaaagaaacaactgccttttggaactcgatgttccatgtaatgggcattgcgacagacggaggcggttttaagtcgcacggggtaaaggagaagaaacatgacttgttgatggatggtccggtagattaataaaaacagataataaggtagaaaaatgatcatgatgaaaaggtataaaaagattttgttgacaggtgtgttgtcagccttgtcttgttcgttcgttcacgcgcaggaactatataagaatgaaaatgcgcctgtgcatgaacgggtaatggatttgatttcccgtttgacggtggaagagaagatcagtttgcttcgtgccacttctcccggtattccccgtttgggtatcgataaatactatcatggcaatgaagcattgcatggagtagtacgtcccggacgtttcaccgtatttccacaagccatcggactggcagctacctggaatctggagttgcagaaaagggtagccacagtgatctcggatgaggcgcgtgcccgttggaacgagctggatcagggaagagaacagaaagaacaattcagcgatgtgctgactttctggtcgcctaccgtgaacatggcacgcgacccgcgttggggacgaacaccggaaacgtatggagaagaccctttcctgagtggaataatgggaacagcctttgtgaacggactgcaaggagatgatccgcattacctgaaaatcgtttctactcccaagcattttgccgccaacaacgaagagcataatcgctttgtctgcaacccgcagatatcggagaaacaactgcgtgaatattattttcctgctttcgaaatgtgtgtgaaggaaggaaaagccgcttccatcatgtccgcctataatgcgctgaatgatgtgccctgcacgctgaatccgtggctgctgcaaaaggtgttgcgtcaggactggggatttcagggatatgtcgtttccgattgtggcggacctgccttgctggtcaatgcccataaatatgtaaagacgaaggaggcggctgccactttatccatcaaggcgggactcgaccttgaatgcggtgacgatgtgtatgacggccccttattgaatgcttacaaacaatatatggtatcggatgccgatattgactccgccgcctatcatgtgctgacggcccgcatgaaactgggactttttgatagcggggaacgaaatccgtatactaaaatctctccgtcagtgatcggttcgaaagaacatcagcagatagctctggacgctgcccgccaatgtgtcgttttactgaagaatcagaaaaataggcttccgctgaatgctgacaaactgaaatcaatcgcagtagtcggcatcaatgccggcaaatgtgagtttggcgattacagcggcgctccggtagtagaaccggtttccatactacaaggtatcagaaacagggtaggcgatcgggtgaaagtcgtctatgctccctggaaatctgctgccgatgggctggaacttattcagggagagaacttcccggaaggactgcaagctgaatattttgacaatacccgcctcgaaggcaccccgagagtgcgtaaggagagttggatcaactttgaacctgccaatcaggctcccgatccgttcctgcctaaatctccgttgtctgtccgttggacgggaaagttgaaaccgaccgtttccggtcgctatactttcagctttacatccgatgacggttgccgcctgagcattaataatcagatgctgattgatgcatggcaggcacatgccgtatctacggattccgcttccatttatctcgaagcgggaaaagaataccagttgaaagcggaatattatgacaaccgggattatgccattgcaaagttgcaatggaaagttccgcagataggcaaggcaactcgtctcgatttgtacggagaagccgggaaagcggttcgcgaatgtgaaacggtagttgctgtgatgggtatcaataaatcgatagagcgtgaaggacaggaccggtatgatattcagcttccggcggatcagagagagtttctgcaggaaatctataaagtgaatcccaacataattgttgttttggtagcaggcagttcattggctattaactggatggacgagcatattcctgccattgtgaatgcctggtatccgggtgaacagggaggaaccgccgttgccgaagtattgttcggtgattataatcctgccggacgtctgccgctcacctactacaagtctttggatgaactgcctccgtttgatgattatgatataaccaaagggcgtacttataaatatttcaaaggagatgtcctttatccgttcggctatggtctgagttactcttcttttacatacagcgatctgcaagtaaaagacgggggcggtgaagtcaccgtttcattccggttaaaaaataccggtaagagaaatggcgatgaggttgctcaggtttatgtgcggataccggagaccggaggaattgttcctttgaaagaattgaagggattccgtcgtgttcctttgaaatcgggagaaagccgtcgggtagagattaagttggacaaagagcaacttcgctattgggatgtagaaaaaggacagtttgtagtaccgaaaggggcatttgacgttatggttggtgcttcttccaaagatattcgtctgcaaacagtcattgatttatagactttatttaaatttgaaccagaaagaagattaagattacattcactgaggtaatgccttctgattgcacagtctgtgtcaccctattggcacagttgtgccaccgcactggcactgttatgccaagcctttggcacagttgtgccaatagggtggcacaagcgtgacacagtatggggcaatcttaagacattacttcttaaaatttagtattatgagaaacaagtatttgcgttttgcagatgtattatttctacttagctttgtggcaggaactacgatgatggcttgctccgaacagcctcatcaaccgaccttgaaggcaacttataataagcctgccaaaaactgggaaagtgaagctctgcctatcggtaacggttatatgggagccatgatttttggtgacgtctacgtagatgtcatccagacaaacgaacataccttgtggtcgggaggccccggtgaagatccgtcttacaatggaggacatctgagagctccggaagtgaacaaggattatctccacaaagcgcgggtgatgttgcaacagaagatgaacgactttaccgcagaccgttctgcatatatagatgaaaatggaaaactgattacccataactacgatggagacggtgacggcacagaattgcggaatctgattgataatctggctggaacgaaggagcatttcggttctttccagacattgagcaatatcattgtagaggctgtcaatccgggtatccctgtcttgataaaagaagcagtgcagaccaattatgacaatacaaagaatcaaagtcagtcgataggcagccttttcgatcagagcactaccagcaaatggtttgccgataacgaccggttccctagctttggaagcctgccatgcgttatcaagtgggcatatacccatgctcccaaggctgtttcctatagcctgacctccgccaatgatatgccgggcagagatccgaaatcatggaaactctacggttcggcagacggaaaatcatacgacttgctggatcagcagtccggtactttttggggggatgataaggacggaaaggggagccgcaataagaccctgtcttttcctttgaagacggacaaatacaccttcttcaaactcgaaatcacagaattaatcgataacaaacagaaaccgcaattggcggaactctcgatagatgcctctaccgaactgccttattccgactatacccgtacgctcgatatagataatgcgattcatacggtaatgtataaggagaatggaatcacctttaagcgcgaatattttatgagttatccggataatgtaatggtgatgcgtctcacctcagattcgaagaagggaaaactttcacgcatcatttctcttgaatcgctgcataccgataaaaccattacggcagacggtcataccattaccatgacggggtatccgactccggtcagcggagacaagcgggtaggggatgcctggaagaatggactgaaatatgcgcagcaactggtcgtgaagaataaaggaggaaagatttcggtagtggacggaacgaagctgaaagtagaggatgccgatgaaataatcgttctgatgtctgccgccacaaactatgtacagtgcatggacgactcctacaattatttctctcaagaagatccgttggaaaaagtgcaggctacgctgcataaagtagctgataagaagtacacggctctgttggctacccaccagaaagactatcattcgttatacgacagaatgcgactgaatctcggtaacttgccggaggcacctgttgcccctacggacagtttgctgaaaggtatggacgagaataccaactcggaacaggaaaaccagtatcttgaaatgctgtatttccagtttggccgttatcttttgatatcttcttcacgagaaggttctttgcccgccaacttgcagggagtatggggtgaaaggctttccaatccgtggaatgccgattaccatacgaatatcaatatacagatgaattattggccgacacagcctaccaatctgagtccgtgtcatctgcctatggtagagtatgtccgaagtctggtgcctcgtggaaagtatacagcgcaacaatattattgcaaacccgatggtggcaatgttcgcggctgggtgacgcatcatgagaataatatttggggcaatacggctcctgccaagaaaagcacgccccatcattttccggcaggggcaatatggatgtgtcaggatatctgggagtattatcagttcaaccttgataaagacttcttgaaaaagtattatgatacgatgctcgatgctgctcttttctgggtagacaatctttggacagacgaacgcgatggtacactggtagcaaacccgtcccactctcccgaacatggcgagttctcactgggctgttcaacttcgcaggctatgatttgtgaaatgttcgacatgatgatcaaagccagcaaagaactgggaagggacaaagaccctgaaatcacagagatagcaacagctatgagcaaactctccggaccgaaaatcggtttgggcgggcagtttatggaatggaaagatgaagtgacgaaggatgttaccggagatggcggacacaggcatacgaatcatcttttctggttgcatccgggttcgcagattgtaatcggaagaagcgaacaggacgataaatatgcagatgccatgaaagtgacgctgaatacacgcggcgatgaaggaaccgggtggagcaaagcatggaaactgaacttctgggcacgtctgcatgacggcaaccgctctcataaactgttgagaagtgccatgaaactgactgttcccggaagccatgtaggcggtgtatatactaatttgtttgatgcgcatccgcctttccaaatcgatggtaactttggttgtacggccggtatcgcagaaatgctgatgcaaagtcagggcggatatatcgaattgcttcctgctttgcccgatgcatggaaaaatggctcattcaaaggaatgaaagcgagaggaaactttgaagtagatgcggcatggactgacgggaagataacagctatagagattctttctaattccggtgcggaatgtgtgattaaatatccgaatgcaaaggagctgaacgtttctggagcaaaggtaaaggtacttgctgatgatcaaatctcttttgctactgtgaagggtaagagatatacaattaaataagaaatatacaattgggaatgtatcttacttataagaagaaaataaaatgtatatatagagtagaaatttaatctctcttatagatattctattcattaaatactcaaattaaaggcagctgattcattacgagttagctgcctttatttattatgtattactgtaggactgagacttaaaacgggagaatacaaatgaataatgaataaggtatagtgatggactggatatctttagaggcactatacacaatataatggacagtgcctctaaagaattgaacctgttttgtatcttactgagtttgatattctacaatgtatggttatagtcataagaaaactgcccgtctcctctaatgggaagacgggcaggaagaatggaaaaactccattcaatgatatcaattacatacctatttcaataattcattcaccatgtttaccagcagtttacctgctatcggatcagtggttgccttttctgtacatagagttgaaacgagagactttcctttattgtcggctatctgtagcagtgtcagtccgcgcatagattcgatacgtgcgatacgttcctccggcttaccaccgtcgatgtaagcatggatcttcatttgagcggcgagttcctttacattctcatggcggacagctttcaatgtggcggtgcaggctagtggaatttcacgcttgttgttattgaaatagcgtaattccagtgcaccgattccgtcgaatacaggggcatcatcccgttccatcaccacaatgtctccctcggtgggaataatccatccggtgatatattcgggatagactttttgtgctgcctctttgctgttcaggaagagaatccgaccgccttttgactgatattcacgcagtaatcttgcttcttcatcggtacattctttcaagcccgatataatgtagagattagctttttgcttggcattcagtagttccttgatagacggtactgtctggcaggcgatgttcaggaagtcaagggtagctttcatatgatccttatccagtaaaacaatcttcttgctggcagttacttgaccgatgttccattccttgcgtgccagtaataatccgtattcattctgcgatagagtgactccgctttcggtgagagtgagtttcagttttacattaaccttgtctgccgttaaattggaaggcatatggatattcggttcgatgtatttacgaccataatattccactgccggaaattgttccgtgccggaagccagtaccttattggtttcgtctacaatgctccatgccagtgacataggcttcaggtcacgtccttcttcattgtcattcactacgtagatacgtgtatgtaacttctcgcctgcataaaggttgcgtccccatagttccgcactgacaagtacgggctgcatagcacgttgcatagcgtaataagtgggatacggttgtatattccggtgatcatagcattggcggaaccaagtcatataggcaaagtgcatgatgcccgaagcctgttcgttggtacgacggagggtttcggccaactctcccgtgatgaacgattgtgtatttaggaaactggcgggattcccccagtcatatgcttcatatccgattaacgaatagggattctgatggatcagttgataagagcgggtcggatgaccagtttcagcattcggataacccgtactcatttcctgactgatcaacgggcgtccgggactcttgaattgtttctggaattctccgttgaagaagcggaataccgaatagtcataccaattatagtaggcatggttgtcatcaatgtctccgtcatcaactgttttcagaaagtcatcaccaaagcgtttgctggctttgttgtggagatagttggagtcgaaacatacaggacgtgtagggtcagtctttctcatatctttcactacatcggatacgatgcggaatttttgtttggcacgttccgtgtcggcatccagatcgtagaacttcatttcattgttcacagtccagaagaatacggaaggatgatttctgtactttttcatcacacgcagccattcactgctccaaagatccagcacacctttgtccggtatcggggtggagtgtatcatgagccacgaccaagtgccctcaaagctgatagcgataccgttgcggtctgctgccgacacccaaagttcgttccagggggtggtatgtgtccgggtagactgtacattcccttctttcatcagcttcatgaacttgtctgcaaggagcgaatcattgggacagagcgcgaaaggaatatggttacctccacgcagccaatatttgcggccgttcagataaaggaatccatctttgctttcaaacgtgcggaaacccgaagttacggtgatgcagtccgtcactttgttttttccttccgtcaggctcacgcgaaaatcataaagattaggagtggcaggttcccaaagtttgggtttcagtcctttgatatcacaggtaaatgtttcttgtgcgcttgtcgctaatgagagtttgctacgtacaggtgcaccgtacagtgtttcccccgtctgtttgtctataatatctacacggatatcgaagtttttctttttgggcgcatgatttttgatggtgacatctattgatgcaccgtccagagccggtttgataaagatatcttctactttcagcgggttgctgacaatgagtttcacgggctgccatataccggcagggttatcaccatagaatccatgagggatgtctgtcaatacggctttgttggcctgctggtcgttctggttatcctccacttccttgcgtactgacgaatagtagttttccatggcgtcactggtttgtgcggcttttccgttgatgtcacgtgtcacttttactgcgatcaggttgcgtcccggacgcaggaatcgggtggcgtctacttggaaatcaccgaacataccgatgttggaacctgccgattcaccattaatatatacttccgccattttggatacggcgtcgaatgaaagagtcagctgttttcccttcacgtcggcgggcagttccagccattggcgataccaggcagcaccggttttccggtagttgaacgtatagttctcgcatcggtcggtttcttgttggtagtaggtgtccgatacccctttatgttgcggaccggtgggcgatggcatggtttctccatgcagccagatacggatagggttccagaaagcgggaacaggcattatatgccagtcgttgtcgttagtctgcatggagatggccttcgtcttatcgttcagttggtagtcgggcatgaacagccagtttccgtccagcgatagttcggtgcggtcggcagtcagtttatccagtttgacggaggtatattgcgcccgctcttcgcggcgtatcttttccttttcctgtgtggtgagtgccatacgatactcctgaaccttgacatctttgagagcgtcttctgccaatggggtgacagtgaggtcatcaaattccgtatctatccatccgcctcccagtgctacttcaccggtaggagccaggttgctgtttttatcctccaaatcaatgtgaggaagtttttcgtcgtttacaaaaacccggatacggttaccgcatacttccactttcactttgtaccactctcccggcacggggtgaaagcccagcggacggactcccatgaattcgtctgtacccatatatccggtacgcatcaggtagagatcgtcttgcaacccgcctttgatacctaccacataacggtcaaagcggttatgtgtacggaagcctgcccatatctgtacctgttcggcgtctttcggggcacgtgccttgaaggacagggtataatctttccactcaggattgccgaagagggcataagcactgcgcgaatgaaatactccgtcgttcacccgacagacaccacgtcccacagtattcagtggttgggaggcattggagaaatcattgctccatacggtttgatcttgggcttgcgttgtcagaccggacaggctacagacgcaagctaaaaatactttgctaatttgtttcatgatatgattttgtagttttaaagttcattgtatttaagtttatgatttggcaaagactgtaattcacggtttgatcacgaaaaatgatgtggcaaatatagagacaggtagttaagtgagagcttaattttcgcttaattgattattaaatatcccttaaatgtggaatttatgcaaataagtatgctgaagaggggataaaagttagctgtagttataaatattcctgttataccttattatataggaaacttatattatatgagaaatagggaatcatacaactacgaaatagggaatagtacaacttaaagcttatatcatggggagcgctttgaaaatctatcaggaataacgccattgtaatactaaaaatccacatcttatataatcggataagtcactaattggatatctcctaatttgtgttatgtttgtatagtatttgccttatttacctttttagcctttctacttgaaatattcttctttttgcaggaagtgaatactcatttagataaagaaatagggtgtggacagcatactacaggatataaaacttcccccttttcctgaaattaatacctaagattgcgaaaaattataagaagatagtattagttttaaaattaattagaaattaatcagagtttaatcgtattttataaaaaatcttaagcaggctcttgttactttgcatcagaactcaaaaataaccttaaatattaagtttgttcagtcgacgctttcttaaataatagataaaaagggtgttttcgaggtgtaacaaatagcaaatgtataatataaaaaagagaccgtgaaaaattatttgaaaatcacgatggggcttgtattagcttccatgattgttagctgttctgatgaggacaatactattgttcctgatactaatccggacccggttataccgacagaagggacgttcatacttcctgctcctgcggtagagagtaatattcccgaacatagttttttgatgggggcgctattcagctatcagaagaatctccgcaatggagaagatgctgccagtggcgggactagttctactaccttttataataagccgcttttcgaagtgaagtcttttggtgctacggaaacagagtggtgggataacttggtagaagagatggtgtatagtggtttggattatgtagctcccaattgccgcggacgcttgccgaaggccgacactgatcctgcttatgacagagatcatggcgatcctacccgtatcaaagatttcattgctgctttacagcgtcggaatgaagaaaatctgaagattgccatcttcgatgactgtccggcttcctgggcggctgcccgcaattttgatttgtaccagacttatgctacattcattaatgccgaaactcagcaaaacaagggactgaccgatgaagaggtgatgtatccgctggacaatttggacgatatatataagtatatatgggattacaatataaaactggccttcgataacttttatggcgagaataaagccaataacaagtatcttcttcgcatagacggcaaacctgtcctgtttttgtggagcatcaatggtttccttaatgtagactatgctgcattgggcaacaagaaaattgactgtaaaggcaaattaaagactattctgaacaagattcatgctgacttcaagtctgcttatggcgaagatctctttatttgtgccgacagagcctttcaggaccgtgataaagaggtggacgaatcagtcgtagaatcactgaacgattggtttattgcctctgagcaggctcccacccgtagttcctggacggtacgtaccttcaatggaaaaactgtaggtgtggctgttccggctttctataccaatgataaatcgggtacccgtatgttttttgatgcagatcatggcaaacgtttgacggatgctttggacgatatggttgcgaagaatgctgatctggtcttcctggaaggctttaccgatatggcagagaatgccgcctattggagaagtaccgataacatttactatgacttccccaaccagcgtctgaacattctccgtaaatacagcagcagccgggcatgggccgaatcattccgtgtagaaatggaggcttgcgattacttcttcgatgtatctgctaagaatagcggtaatcaataccgcaccggaagtttggatgttgccaaaatagccggtgtggctccggataagaacaccgaatggtatgtcaccagcacagaggcgggtgagtggatggaatggaaagaactgccttatgctgccggagatatcacagtcaaggtatgttatgctgccaaagaagatgctaaaatccgttttgactttggcgaaggcacgaaaagaagacaaggtcctgtcgtagaacttcctgctaccggaggcgaatgggttactgtcgacgctttcaccatgaagagcgatgtgaacggctggcgccgtactgtgctgaacattgtggcgggcaaacctgatttgaactacttcaccatcactgtagaaaaatgaaaagaacaaatttattaattataaacttaagctaatatggagaaactttatctgaaaagaagctggaggatagggacgtgcctgatggtattgctcacgttcttcgcactttcactttcggcgcaaaaccgaaaggtcactggagtcgttgttgacgagtttggtgatccgcttccaggtgctaatattacggtggttggaaaccaaaacttagctactgcgacaaatatggagggacaatttaccttgaacaatgtgccgaaagatgctattctgaatgtaagattcataggctatgctgtaaagactatcagactggctaccttgaaaaacaatgatctgctgcgcatcgttctaagtgaagatgtcaaagaactgaacgatgtcgtggttacggcattgggtatcagccgtgaatccaaatcgttgggatatgcccgtcagtccattgacacggaatctctgctggatacacgtgacccgaacttattgaatagtctgagcggtaaagtttcgggcgttaattttatttcgaatggcggtccgttgtcttctacccgtgtggagattcgtggtaacaactccctgaccggaaataaccagccgttgtacgtaattgacggtgtgcccatcatgaatccgatgggagaagatggagacttggactatggtaatcctgcttctgctatcagcccggacgatattgaatcaatcgaagttttgaaaggtgccaatgcggctgccttgtatggatctgatgctgccaatggcgttattctgatcactacccgtaaggctaccaagaaatccggactcggtgtttcttatggctacaatatgcagtttactttcttgcgtgaatttcctgcctatcagaatgtttatggttcggccagccttccggctgccggtgtgggtgacggattcaactattatggttccaactcaaagaacggttatgcttatgaccccagcctgccttatggtatttttgtatttaactgggcgaatccgaaccaacgctcatgggggttgccgatgttaggctttgacctggtgggacgtaataatcagatacgttcttatgtacctaataaggatggtatcacggatatgtacgaaatgggtgtagccatgactcatagtgtttcggtcaataaggtgttcaatggagcaggtatccgtttcaactatacgggtatcgactacgacggaatgctgaagaactttgataacatgaagcgtcacacatttgacctgcgtgtgaatatggatctggctaaatggctgtccagtgaaatctccgttaactatcagctggaaacagccgataaccgtgactttaaaggggacagtaatcgtaacccgatgcgtgccatcatgaatatgccgcgtgacgtcgttatggaggaattattgccgtggaagcgcgagacaggtgaagccttcacgcgtggtaacggattctacaatccttactggctgctgaacgaaatcagcaatggtgacggccgtaataacttctgtggtaacctgactcttaatatcaaaccgattcagggaatgaatatccgtttgcgtgccagtgtagaaaaagcaaacaagaacggttggaagttcgacaattattataccatgtgggatatcgacggacagtacgaaactttccgtgaagcctccaacaactacaattatgaaggagttatttcttataaccgcaatatcaagaaggtcagcctcagcgctaacttgggtacttctatgcaaaagaatgactggtataaactctggaatcaggtttctcaactggcagctccggatgtgaagtcattgtccaacaatgcctctatattgagtgggacggaaagtgtgaacgcgaaagagaagcagtccgtattcggtatgttgtctttgggatatcatggtttgtttgtagacggaactttccgtaacgactggtcaagttctttgccgaaagctaacaattcttacttctatgcctccggtagtgccagtgccgtgttgacggaaatcttccccaaactgaagagcaagacattctcattcgccaagttgcgtggttctattgcccgcgtgggtaacgatgccggtttcgaccgtttgattaacagttacagttacggaggtctgttccgtaatgacatggcatggttccagggcgacgccgtacgtaagaatccgaacttgaaaccggaaacaaccatatcaaaagaaatcggtgcggaagtccgtttgctggacggacgcctgacagcagatgttacttactatgacaaatatacttgtgatcagattgtcgagtcggaactttcttatttatccaattaccagcgtgtaatcatcaactccggtaaaatatccaataagggttgggaaatctccgtgagcggtgtgccggtgaaagtgaagaacttcgagtggaaaaccattttcaactggtcaaagaacaattccatggtagaatcattgcccgaaggtatcgacaagatacagattggtagcggtgtgtacaacgtgaagtcttatgcggaagtaggcaagccctacggtgctatctatgcgaagacatttaagcgcgatgccgaaggatacatcctttgtcagctcgacgggtcgccgaaagaaggacaggactatgaatatttaggctgtgtacaagctgactggcgaggtggctggaacaacgtgttccgtttgggtaatttctccttctctgtcatgttcgacttccagaagggtggtaagttcttctctcagacatccatccagagttctgtagacggacaatccgtcaaatcattggaaggtcgtgacgcggatttcttctccagaaagattttgggtgagtcggacgaagaacgatatggcttcatgcgtcctcagaacgccaacacaccgactgcaaacggacagatttatcctgactggggacgtcctaaaggggtagttcttcctaattgccgttatgacgaagacgtagaagggctggctggacaacaagtattgggttattgtacccccgaacgctattggatgcactatacctctcgcgatatttcccgtttcatctacgatgcttcttatgtgaagttgcgtgaaatcactgtcagctacgatttaccgaaaaaatggctgagaaagactccgttccagacattccgtgtggcggctgtcggacgaaatattgctaccctgtttgccaatacaccgcacgggctggatccgcaggcaacgagtacaacaggaaatgcacaaggtttcgaacgtggtttcaacctgccttccgcaacctatggatttgatattaaagtttctttttaaattcgtaaagcatgaaattgaaaaacaaaatattaccgttactcctgctggcatcgactgccgtggggtgtacggacggtttcgaaaccaccaactcggacccgaacaaattgtatgaggtaaatctgcagagtattttccccggtacggtttacaaaacaatgaatgcgatcagtgaattgaataataaccgtatgtggagttattcacgttacattactaacgtcgctttccagacaccgtggaacgaaaggggagacggattctaccgtaagttttatgtagagattctgcgcgacctggaagagctggcaaaagcatacgatgatggctctttgcctaacagtctggctgttgtaaagacatggaaagcattcacttactaccagttactgtcactctatggtccggtcggactaagccatgccggtatggacggaggaacggacaagcgtatctttgattatgattcggaagccgatgcttactattccattttgggttggctggatcaggcagtcgatgagttcgacgaatcatccactgataagattctgaaagaccctgtttataacggagatgtgcagaaatggcgtaaactggctaatacattacgcctggagatagccatgaatatccagaacatcagcgaagagaaagcacgcgaatatgctgcgaaatctatgagacatgaagaatggctgttcagttctctggacgatgcgtttgctcctaaatatggaacggtgatcgacaaagactgttcctggtattacactcgtttgtataaagaagaaattcagacgaaagcaaactggggactgatcccttccatgaacgaatatttcgccatttatctgttctcatacaacgatccgcgtatggagacttacttcgacggctccaacgtttattggccggaacgccagccttatcgtatgacggatgtgctgactcgttcacacgactgtgatgtgagcggttgttccgccagcgatcagcaggaacatctgcaatggatgatagatggatatgaagtgcgtgattcattgcgtgtacgttactccattccatacgttcctacaccggacaatccgggtgcccgtacaccgttcggctggagaagaccgatcgacccgaccgacccgaacggtacaagagaaatccctgatccattgtcaatgaacgaagacaacagatgctacatcaacccgagatattatgcaatggacgctacgatgcctttgctgcgctgggcagatgcttgtttcctctgcgctgaggcgaaagtgaagttcgacttgggatccaaggatgcacagacttattatgaagaaggcatccgtgcttcattcgaagagaatggcttgtctgcttcttctgctgcctatatggctcaggaaggaatcgcctggggaaccagtcataaaggattctatgatacccgtaaactgatgactgccgacatcaacggagcagacggtaaagaaggacagctggaacaaatctacaaacaacgctggtttgccgacttcctggatggaatgtctgcctggcgtatggaacgccgcacacgtgcattgaaccttccgcctctgtttctgaacggatctcaggcttatgaagaaggcggaaatatgtactacggctggcccgaacgcctttacttcccggatgcggaacgtcagacaaatgcagaggcttattacagagctatcgatttgttacagaagaatagtccgaagcctaatgccgcccgttggggagacaatatcttcacgatgcttcagttcgcaaaacctgtacctaatcaggaagagatgatagccagctgggagaatattgattatgtacagttcaacatggatttccaagccaagaagtatggacagacttatgaagagttcttgaagaatgcccgtgagctgactggtatcaaggatgccgaagaggctttggacaaggcttataacttcttgatagaagctacacttttagtttataaggtagaaaagtagtaattaagtaatgactgaaaaatgaaaaagtataagatttttaataagacaggtcttgcaatatgcctgacgttgggactggtagtcggatcggcctgttcaccgacagatgacggtccttccatcgatgatcatttcttgaactatgagattccgcaaatcagaccgagcagcgatattccggtaggagccctttattggaacttgggtagtacgggtgtggatgaaaagaagtatgcgcggttgattggtgaatataatcaaggcggacagtatccacagctttgtccgaatgtgcgtccggtgctgggacgttattcgatggatatcaataaagccgaaactgctgacttgattcagcagcaccttacctgggcaaataatgccggtatcaatttccttatcttgccgaacatcggtctggataccagtaagggagatttgctgaacgaaggtaacgtgaatttcgtgaactatatggcgggactgaatcccaactcggaaggtattgagtggggaggtttgcgttatgcggtttctatggatatgaataattttgcaagcggactgaataataccgccatgatagaagatgatgccgatgaaaatggtgtctctgcacgttgtgagcaactttatagcttttttgtcaacctgacaagccgtttctgtacgaacaacgatctttactatactgtagacggcaaaccgatgattgtagtctggaatgctgataagttgtatgcacgcgattctgagaaactttataatacgatccgtgaaagagtacgtgaaaatgtaaaagacggcaatggcaatgggcttgagatctatatcttagcacgtcaggaacgctggacgcctcccgcacgctggcataacttcttcctaagcggaaaagtggatgctgtgtacatggataatatgtacaatcagaccgactggttccgtcctacctgctatccgcagtgcatcgaccagaactttaagtacaaccgcgaatatgagtgggctaattacggagtagacttcgtacctagcgtttcaccttcgttcaatcagtggatagatggtgatggaactcagttctataacttcccggtggtatttaaggatgaagatatgttccgtaagatgtgtaatgttgccaagatgaacttgggaaagcgtccgatggtcatcatcgattcttttaaccgttggaatgtggatcaggctatcgaaccgactgacccgaattacgggaatggatacggtatgaaataccttaatattgtaaaagaagaatttaaagtgaaataagcatgaaagcgataaattttatcaattggaaatatatcggcttgaccggatgtttggtggcatcgttactgactgcatgtggtgacgatgaaaccggtccggaagtggtgatgccgctagagcctaaattggagatcgtgaacgaagcgtccaccttcagtttttcttctgcgggaaattccgctcaagtgttgacattcaatgccaatcaggattggcatatcgtactggatgattcggaaggtgtggataatagctgggtagtgctgtttgaacgcgaaggaacggccggcgaaggcaacaaagtatgggtagctgcagccgaaaatgtggaaccggatgcacgccgtgctaatttttctctcgtgtccggtggctttaagtttgatttcgttatctatcaggcacagaaggatgcggtggtaatcaccgacccgaaggcctacgaaaacctggatgccggtgagcatatcatttccgtagagtttggaattaacacaggagagtataaaaccagtttcctctattccggtgacacgggctggatcatgccgacggacgaacgccccgcaggtgaaccggagacacgtgcgatggagaaccatacactgtactttaaggtgttgccgaatcagaagtttgatattcgtagaggtaccattgaaatctcttcgaaagataatgataatgtaaaggctacgatgaatatcttccagaccggtctgcccaaacctgtcattacggtcgataacaaggaaatgttcactaacctggcatcgaaagaagattcgattctgttgaaatataaggcaaccaataccaacggaccaagggatttgacgattgatattgataagaacgatcaggattggatttcgtttaagcctgctatagacgccaagggcgattctaccttcctcgtttccgtgaaagaaaataccggtggcgaacgtacggcaacgatcgcgctttgtgccgctgccgataagaaggtgaaagaagagtttaccgtgactcaggctcaggcaagcgatgtggaactggttattaccaacaagagcgatttcagaacaagtttggataagttgggcagtgccgctaccgtgaagtatggcgtacagtctacgttgaccgatccgaagaacgagattttggtggatatcgtatatccggaagaaagcggttatacggcagagaatggttggctgcacatggcaaacaactcgatgcccgaacgtgtcatcttcacgtacgatgtgaataaggtactgagagaacgtcaggctactgtctacatttatcgcaagggttatgaaaacaagaaagactatatggttatccgtcaggctgcggccactcagattgaaattccggctccgggaggtttgacgaatgtattgcagagtcttattgatgacgaaatctataaagattgggaatccatcactagtctggagttgaagggcagactcaacgataccgatttgaacttattgaagaacatgatgacagcgggtaagggctacaacctgaaaactctggatatgacggaagtggagaatgaaacgctgaagaatggtgtatttaacggatgtaaccttctggagaatatttcattcccgacaggattgcaatacgtaccgagagaagcttgtcgtaactgtaccaagctgagaacggtagtggtgaacgaaggtccgacttatatcggtcgccatgcattcggtaattcggtagtaaatgaagcttggttcccgagtaccatgacttatgtttacggatatatctttgataatgtgacggcactcaagactttgcacttaaagtcattaccgttccagtgcaaggaagttgcccgtagtgatgccgacgaaggtgctacccaaccgacaacctggtgtactgtctttaagacatggccgagcacggtatatgtaccgatggaatatctagaatattacaagaatccggacccgaaacatgtagtttccatgcacttccaagacctgttgaatacattgacatccgaatcggaagaatggacgaagggcccgaaggttcagcaaccttacttgaagtctaattcggcattgaagagtaattttacttggggatcatctgccactactatcatgggagaatccaattgatatagagtcaagtaggtatatactataaaaagagcggactatcagtcggcgggaagattcccgccattgatagtctgcttttcttttgagtcagtagtaaagtcatgcattgtttccttgtcgattcattcgtaatggtacagtaaggttttcagtcctatgacataaaaaaagaaaagagtaattgttgtaataattcatttgcttatttaaaggacaaagaacttttcaaggtcagcacccatatctatacgaaagatattgaccgattatgcagtaacttccaatcgtttattaataaattctttcatcgtttattataaacgtcccccaagtttattataaacccgaatattgctattttagtaataaatatcaatataaagcaacaaaaagggctgcaattcccataaagaatcgcagcccttagcttgtatcagactatctgacaagcattatccgaagtggaaatgcctgtaaactgttattatattatacttattatcgctcatttttcgtctatattatcaatgttatcgaattttcttccggtttctacttacaaatatacaatataaaaagcggtttgtcaagtcctccatgcttctttcgtacatctgattatccattcatacagtttagctcattcccgtacagttttgaactaaatgatagtcagttctatcttccattctcctccttcccgaaggaggagaatggagatggtaccgactttttagttacccccaatggagatactactgtttgattcatttttcatttaggaaagaagtaaagctgtacagttataaatctgcgaatggtgttttataatcttctcccatcgagtcccgatactccttgcagaaacggtcatacagatttcgtgcaatccctttctttccctgtgcggagaacacagcgcatttggcggccaatgcttcttcattcagcgggtcgtgcaggaacatgatgtctgccaggcggagaatcatgtccggatgattacgttgcttttcaatttcaaacagatccttcaataagtcgatggagtggctggagtatgtttctttgaagtcatccaaccaatcgagaatggtgttgggcaacaatggtccatacaacagaagttccaagatacggttgagtaattcgtcgttttctttctccttgaattgctggatacgtgcaagcacttcgcgatagtcgcagaatacgttctcgccccatttaatgtgcatgaagttgttttccgtcacgacttctacatcaccgatactctccaataatacccgaagcttgcgtaagtttacattacggttgttgcgggcagccgtctcttccttatccggccataggattcccgttgttttggaggtcaggataccgttcggattcttttctgtatataatatcagcaaaataagcaaatgcttcagacggggagtgaaattggcggtgatgtcatttccctctttatcgcgtacattgaagcaccctaacaatgagatggaggaacggctacggtcatagtagttgactatctctttcggtgcgggatcgctttcttgttccggcatcatcggagtaactttctcttgattctcagagatggcttttggagcggcaaccgattgaggaacttcttttgaggttgcagccggctggattggctgacgtttgcttcttgaacgatagaacagccaggcaccacaacctagtattgccaggacaccgatgacgtacagtagattccaccatttgccggagcccatttcatccaccgactgacggatatctatctcgttgactagaggcatattgatggaatagatctttatatcgtgcgtacgattgttcagtattttgtccagcacaaggaacagtttcctgtgagtcggtgaatagtaaaggttaaaatcgcagtcctgataatccagtcggttattgatcggttttgaaacttctgtataaacagggcttttcatggaaattttccacagtgttcccccgttgtccgtagatacggcatagaaagaactgtctgccggttcgaagtacatggaggaagccatgatggtttccttgttatcatcttttttctcccagatggtgcgggactgtttactttttaaattgatggcatacaggccgaggtagtaatgggtactcaattcctgtttaccatatttgtttcctttgcctccaaagatatatagttcgtcgcccactactgccatagcagcagaatagcggggataaagaggatgatcatatttaatttgctccataatttcactgccggacttcatgcggaacaggtcattacggtatttatagaagccatatccaccgaaaaagtagaatgaggagtcggcggggttaaatgctttggcatggttatagttgttgggttctttggtattccgcacttcgttgctccacttgccgtcggcgaacgaaaagcgggagatgatgttttccgtcagtgagtaagataccagtgcattgcttagcgtatcatacagcaggtggttgggatattctacggcaggatatcctccgcgtacggcagtctcttgtttgagtcttccgtcttcgtccagcacttttaccgattcgggactgactacatagaataaggcgcaacgggcgtcgaatgctatgcctactctgctggaagtattgatcttattgatagttttccattcgatatggttgtctatcagccagagaggctggacagcacgcgcgacggctccctctttttcgtcatagcagaggttgtcattatgtttccataatttccattctcttgtcagtttgccgtcctgtatgatgttgatatcccttaagttgacaggggctacttccgcctgatagcctagcatctggccgaatgtaatcgttacgctgtttgtttcttgcagggggaaggtggacgacatcttttttttgtcgtattctatttcgatcacattgtctttctgacgcagattcagcgagacattgatccatttttccagttctatgggtttgtcaatgatgataatttcatcattgagcattaaagcgggagcatggttttgctcgcctgcaacaaacgaaaagcgtattatctggcctttgtctgtcttcagatgaagaatggagccatagtcggcttcattggcacgtatatatatctgaaaagaaatggttaagtcgttttttacggagaaaggttggttgtcatccaaatataaggtagacctttccggtgccggtacggcatgagacttaagataaagtccgtaatcatataaaggagacgcatccagtctgcccgccaggcaaagcaggataaaaatcaataattgcagttgatatttcatagtacttctacttgaatctgttcctatgtggcaaaagtacgaaaaacaatatgatattcataagaatcggggacttattttatataaccaaagtgttggaatactcgtatatgatagccgacatccggggaatatgacaagaggtattgtcgaagaatcagatgttatttcgatgattcttcgacaaccctcttgtgtttaatcgctagaatatagctacttgatttctaatgatggaggaacatcctctgctccgctggcccatgtcttgttgggtttgctgcccattaccaatactagcttgccaccgttcatcaggtcatcatggctgaaccatgatttgttccattctttgccattcagtgtggcggactggatgtatttgttgtcattggaagcgttcttggcttcgatttcaaatacggctccgttgctgagtgtaatcttggcatctgtgaaaagcggacttccgatggtgtaggccggcaatcccggagtgacagggtagaagcccagggaagagaagaccacaaatgacgtcatacctccgccgtcctcatctcccggaatacccatcaggtcattgcggaaccatgttttcagcatttgacggatgcgcttctgtgttttccacggctgtccggcatagttataaagataaggaacgtgcagagaaggttcgttcgccatcgagaattggcctacattacccgtatggtcgggcagttttgcgtagaatgcatatttgctccgtcccagcggttcggtgaaagtgcggtcaaggttggcgatgaactgctcgtttcctcccataaggctgatgaggtcggctacattgtgtggcacgtcccagcggtaaacccagccgttgttttctccataatactcacgggctcccatgcctccggggaaacggtagtcgaatggctcaatccattgtccttccttatctttcggatggaagaaagcggtttctttattgtagagattccggtagttatacgaacatttcagatagtattcggcttcttccttcttgttcagagcttgggcgatacgggagagacaccactggtcgtagctggttcccagagtgacagcgacaggctggcgcttctcgaaaggatgtacgttcgggtcgttttccggttcatctacacggagagcggggatataaccgttttcacggtagaaattgtccagccagccggccggtgctcccgaccacggggcgagcgtcttttcttcaatccctttccggcaagcctcgtaggcttttgccgtgtctactttcaaccctttggccagtgcgtcggctaccgtggcaacggcatgattggagttcatgcgacgtgtgtcacctgttacttcggggaaagtaggcatccacatattgcccatttgttccgccatgcgcaggtaggatgcgatgatgtcttcttccttttgttggtcgatcagtgtgcggagaggatgtgcggcacggtaagtgtcccaaatccagtcgtcggtgtagaaaggagtactgttgtcttcgtgtacctttccatcgaaggcgctgaagtaacggccgtcttcgctcatgcagatgggacgttcgaaggtacggtagaaagaagagtagaatacggttttgtcatcttccgttcctccttctacttggatacgtcccaacgtttcgttccagatttggcgtcccgcttctgccagtgctttgatgttatagtcttttaattcgcggtgcaggttcttttcggcctgttcctcgctgatgaaagaaataccgtagcggaggttgaccgttgtggttccatcggcaaagcgccatgccgcacaggcatttgcgccttcggcattatccttgcttgtttcaatagtgccgttttcgaggatgccggcgcttatcggcttctcctgtgcttctatatatacatagacattggtgttgtcatttagttgctggcgaccgctgatgaagttctcgttggcgtgaatagagccattgcgggagtttacgatgagataagccggtttgtctgcctcatacgttatccggtagatagccgactgatgggaaagcgcatattccgctttcatacggttgtcatccagttccacatcgaaagaataaggagtaatgtgctcgttgtcatagttatacgttatgaccggacgcagcttttctccctgatagggactgaaattgaatgcagaacgttcccggtggttggtgacgatcaatggaagccccttcagcagttcggaggtgtaatcggcacgttccgggtaaacacgaagcatactgttgggtaactggatggtggggaacgtgggaaccagcagatggctgatgttgccgatatacgggttgacgtaatcgaccggggtccgatccgctgtttgcaggctaccgttacatgcactcagcgttgaaatgatagccgccgaggctaaaatgtgtgtaagtttcatcatttgtttatttactattatttggtttccggattcacgaaagctgctttcaacagcggaaggaaatctttcttgttatcgcatttgaaataaccggtgaagtcgttccggtctccggctcctagtttgatcaccagtttattccatccttgcagcaagggcaattctttgtagatgatttcgttgcgtccgtcgtgggatacagccgtataaggtttgtcgttgatgagcagcgcacgtttctttgctttcacaaagagggatagtttcggcatgttcggttctatcaacaggtcgtccaaagggcgtggactgaatacataaagttccagtgtccattcaccgtcgctgtccttcaccagtttctctttggtggctacggggaagttgatctgttcgtcgcgcaggaagaagacctcgttgatattgacttccggcttttggaaggctattccggcattcttcagaatagcgctcaaagtgttgaatcccttctctgagttggcaaattcggttaatgtgttcagatagaaagtggaagcattctgctggcattttacaaatacaggagtggcggctgtacattcgtattcactgcggatcgttccggcagtcttgatctcttccgggcgtttgttccactttctccagtcggtcttacaggcgttcagcaagacgtcgccttcttctacgaaagctcctttcagcgagtagctggaagcgttggtcttctgaagttcgcagaagtagaagtcggaattattgagtccgtgcatccatgacttttgtacgggcaggaaagaagaacgctgcagattatccaaggacaccggaagcggaagaatttcattgtatgcggctaccgtttccggtgtgagtccccatatccatacatccgcacctttggcgatttgcttttgcatctcattcttggtagaagcatccaacttttggctaccgtctacaatatagagcaacagggaaggagtgtttgccttcttggcgaatatgactccttgcgcatccatcagctgctttaatttactgttctgactaccgataaagatgacttccttatactttttggaagtagttgttgctttgcgatggtcgtactgttgtttgtcgattacagcataaggagaccaggccggttgtcccggagcattggctgcgcgtagagcactgtacatcggccattcctgatagagcggcaaggtcgggtcgtaaccggggttgaacgtcgtgcaataaggacctacacgttcgggttgtacgcccggaactccctctttgtaatcaccgaagaagactccgtcagcttcaacggtgggagctttgcttttgtctttcttgccgagtggaagcggtttcaaggcataccatgccatattgaagactgtgctgtaagaggctcccatctgtctttggttggcgatgaggttgtaacattcgttagccagcccttccatgcggccttcctgtgattcgtaagcgcgttctccgttatatttggcaacctgttccggggtgccgtaataagccatactgtgttcaccgattccccaaggttttccgatttcaatccagcgtttcatggagttgatgtctccgtagtggcctacagtcacaggcaatataccgtcaccgtcatcttcgccgtctgctgaaatccacgggcgggtagggtcgtactgatgtacaatatcacgccattcttcccatgccttcttttgtaccggcatcagttcggggcgattgtaaacgtgcaggataacgggtttgttttcgttgctgatactccagccgaaaacggacgcgtgatttctgtcgcgcaggacaaaacgtttcagatgttctttagatgcctcccagaagaggtcggagtccagtttcggaccaccgtcgctggcccagttggctgtttcgttcagtacgcagatacccatttcatcggccatatcaaggtagaagcggggatagacttgcgcgtgcggacggactgcgttggcattcatccctttaatggcggtgaaccaggcccacgcataacggcgggtcatctgcgggatacccataaaatgccaggagtcaccatgcaatgcgtaaggttcgccgttcaggtattgtgtagtaccttgcaatgtccattcacgccagccgaaacgttcgtatttggtgtcgacagtctgtttctggttgttgacggaaagtaacagggcatacaggttgggatgctccggagtccagtattttaatatatccttgccgacaggtacttgcaaggtcactttctgtgaagccttggctggcagggacactttcgtaggagcgactttcaatgcttcattaccaagcgtccagttcggaacgggagcggagttgacgtccgtgcctgcgcagttcacccattcgcggatattaccttgcagttgtacatcagtcttcttctctgtccggttctgaagagttatttctatttccagtgtattctttgataccagcggtttcacgtatacgtcttccagatggattttcggcaaagccaacagatatacatcctgccagataccgttgatctgatatccccacatcgagccgcccggaacaatgcggcgtccgatggtcgcattgttttcgaataacgactggcttcgtacgcctaccagtatctctatgttttcgccggcagtcactttatcggtgatgtcaaagctgaacggtaagaacaaatcgaagttctcgcctaccttttctttatttacgtagacttcggaatatccggctacggcctcaaagtgaagtttgatttgttgccccgaccagtcggcagggatggtgacattcttcttcatccatgccattttcacttgttcccattctttggggtatgaagggtagttgcggtggtcgggaccttccaggtcgcggtaagcaaaagcattgatattccacggtgaagggattttgatacgtgttttgctccattcgctgtcgttttccggcaggggtagttcgggagcgattccttttccctgaacgtattctttcggcaagcggacaggctggaaatcccaataaccgttgatgcaaatctcttgtcgatgttccttttctgtttggttcaccagaccttcgctgggggcaaaggtgtagggatagaccagtttctggtcattagccactgtttgtgtctgcgcgtttacctttgtagattgcaaggtaaagccggtcagcagaccgcatagtaaaattaaacttctcttcatattcataatttaatgagtttttcggtattatcaagggcaaagtaaaggtcgaaccattaaaaagagaggataaagcaaattaattcttcattaaaatggaattaattgtatcataaaatgtctttttctctccggaaaggatgaaaatggtccggttacttgctttttatccgaatgtaactcacttgggcttttcgtattgttctaccgccctccttaatttcttttctattagctccaccagtgtctgcgggtaaagaacttgtattccgttggcatatccgaagaatacccgctccagttcatggttgatgactacctctatttcaagaatcacacttccgtctaccattgtttctatggttcgttggctgtggtgtatcggtttggtcaggatgtagggaacttcggcggcagctactttaaaaccgaccttctcggctttgcttccggagtttttggtcacccctaccaagtcgtcaaagaatgtgttcgggtcgaagaatgtattctttataaatggttcccgcgatagtacctctaacgaatggattctgtccagagccagattctgcaatatccgtccgctttttctgattccaaatacgaaccaacggttgcgatattcctttaatagataaggatagaagatgaagctgtttgccgaacgggccttgaacgaacggtatttaagttgcaggggatgttcgttgacgatggcatggtaaatggtatccagataatccagccctttcagagattcgttcttttcgaagtcgatgaccggagtcgtcttcattcgggcggaagctacgtgatcttccagccggttcacaatctcactcatctccgtgaagtaggagaaacccttgaactgccgcagaacttctacggcttccgacatcgttttcaggtcctgttcgttcagcggggtctgtgtgatgctgtattccgggtcttcgtacttgtaatacttgttttcgtataccacaatcggtgcgttataacccagcttctcgctgcgcatcatctgtatatccatttgtacggcacgtttgctgattcccttgtcgattccttcatattcgtaaagggcatccgagcaggcatctaccaagtcttccagtgtccagcgacgataaggattacgcagacagttatcaatcgttttataacgaatcaaggcatttctattgaccggcataggcggaagtataaagattttctccaaaagtagaaaaataatttgaggtacgcaaaaaggctgcgcacccacccccgtatctttgcaaaagaaaacaaataaagagtataaatgatgaagtttaactggataaataaaggaatgaataaagtgctgaataaagaatcggcaccggcttaccggctgacacccgaatgggaattgtacacatccgtggtaactacttcattgaacaacagtttctatgagcaggcggaagagagaatagaaagggtccgtacgctgatcggaaaatgtgatcctttgtttgtggcgcaactggcggcgtacgcaagagaaatgatgaacctgcgttccatccctttggtgatggcggtagaactggcgcgtatccaccagggcgacaatctggtgaagcgggtaactgcccgtaccgttcggcgtgccgatgaaatcaccgaactgctggcctgttatcagcaggcaaaccggcggacggggacaaagaaactgaaccgtctttccaaacagttgcaggcaggactacaggatgcattcaatacattcgatgcgtaccagtttgccaaatacaaccgttcggcagaagtttgtctgaaagatgccttgtttcttgtgcacccgaaagcgaaagatgaacggcaacaggaaattttcaatggaatagttaacgataatcttccggttccctatacttgggagacagaattgtctgctttaggtcagtgtacctttgttacggaagaagaacggcgaaaagctttccgtgccaaatgggaagaattgatagacagtggtaaactaggatacatggctttgctgcgcaatctgaggaatatactggaagcggaagtttctgcagaccatattctgacagtagggaagaggctgtcttccgaaaaggcggttgaaaactccaggcagttgcctttccgctttttggctgcttaccgtgagttgtcgaagactccttcgctctatgctacgatgttgatgacggctttggaacgtgccgtgcaggtgtctgcccgcaatattaccggatttgatgaatctacccgtgtgctgatagcctgtgacgtatccggttccatgcagtgtccggtttcggcaaagagtaaagtattgtactatgacatcggtttgctgctgggaatgttgttgaagtcacgttgcaaacaggtgatgacgggtatctttggcgatagatggaagattatcaatctgcccgatacgggtatcttgtccaatgtcgatgctttctataaaagggaaggtgaagtgggatactctacaaacgggtatttggttatcaaagacctaatagaccgaaaggcgcagatggataagataatgatgttcactgactgtcagttgtggaatagccatagtgacttgcagataacggatttgtggaggaagtacaagaaaatttgtccggtagccaagttgtatctgtttgacttaagcggatatggcaacactccgctagatatcactcgtgacgatgtatttttaatagcgggatggtcggataagatatttgatattttgtctgcaatcgacaagggaaatgatgcgttgcaggagataaaaaagatagtggtataaccggagttctcaggattccggtttacgaaagaaacaagtgtcgtagagaagagttacttcgtttgggacgaccataggtcgcgggttcgactcccgctgctctccttattctttgaggaaaagcatagctcagttggatagagcaggttatagtctcttttcgtttgttaccttgtttttactttgacataagcagaatgtcgtagagaagagttacttcgtctcattttaggggaggaatagtgaagttgtaaaatcagcaagactatccggttcgactccggcattgacgtgccccatttctcttttcgcctgttacttctgcttttctatatgcctgtagctcccttttttcaatgatgtatcaaaagtgttactctttgaaacaaagtttatagacgaaggtgaagatagcccctatctttgccttcgtctatttttgactaacactcgtataactctgaatatcctgttaccatgaaaacaactccttggataaaacaatgtaaaggtgccacactcgcactggctgtttcctttggactgacctgttgccagtcaaccggaagcacattcacccttgaacagaaaggtgatagcctgacaattgtccacatcgttcatcctacccattatatattactccccatcgaggaagaagccgatgaaagtcaggtgcggctcgatacggggaatgcaacggataccgatatggatatccgtctggcacagacaaaggtcgattattttgttccctttgccttgccggctgatacaaaggcagccactttgcgcattcaaaggaaatcgaaagacgccctctgctgggaagaaatcagattatccgatacgtttgatactgccaatacggataaattccgtcctgtctaccatcatactcccctttatggctggatgaatgatgcaaacggattggtatataaagatggagagtatcatttgtattatcagcataacccttatggctccaaatggggaaatatgcattggggacattcagtcagcaaggacctgatgcattgggaacatctggcgcctgccattgctcgtgatacattagggcatatcttttccggcagttctattgtcgatcaggagaatgtggcgggctacggagcaggttccatcctcgcttactatacttctgccagcgataagaacggacagattcagtgtctggcttatagcaaagacaacggacggacatttactaaatacgaaaagaatcctgtcctgcgtccttccgatggtctgaaagatttccgtgacccgaaagtcttctggtatgcaccggagagtaaatgggtgatgattgtctctgccgataaggaaatgcgtttctatgactcccataatctgaaagactggaactacctgagtagctttggcgaaggatacggtgtgcaaccctgtcagtttgaatgtccggatatggtggaacttcctgtagacggcgatatcaaccataagaaatgggcattgattgtcaatgtaaatccgggatgttacttcggagggagtgctactgaatattttatcggtgactttgacggtacaaaatttatttgtgacaatcagccgaatgtcacgaaatggctggactggggaaaagatcactatgctaccgtctgtttctcaaatacgggaaaccgtgtggtggcagtgccttggatgagcaactggcagtattgcaatatcgttccgacccggcagttccgtagtgccaatgcactgccccgtgaattgggactctatacacaggacaatgatatttatctttccgccgcaccggtagcggaaactaagaacttacgaaaagaaagcaaggatattccgtcttttacggtagacaaggattatcacatcgaatctttattgactgataatgaaggagcttatgagctttctctgaacatcaaaactggaaaggcggaaattatgggattcagtcttttcaatgacaagggagagaaggtggatatttaccttaatcttccggaaaagaaactggtgatggaccgtacgaaaagcggcatcgtagatttcgggaaaaacagctctccgcacgagatcgaggcgcacgatcgatggaagacgatttctatcaattatatagatgatttcgcattggctacatgggcacctatcaaaaaggaagatgaatataaactggatgtctttgttgataagtgttcggtagaaatatttctggatggtgggaagatagcgatgactaatctgattttccctacagagccgtacaatcgtatgtgtttttacagtaagggcggtacattcgcagtcgattcattcagtgtgcataggttaggtttataaaaggatagatttgtttttcagtaggtatttatcaagaatataatcaagtgtttatcacttgtatcatctgtatttcatagattagatttatgagttagtttttaagttaggttttgtagattaggtgtttgacagctgccgtccgtgaggttcggcagctgttctgtgtttaatctattcgcagaataggttgtcattacttattcattgatctcaatcgtataccctcctttgaaagtttctttcggttgcaggtgttgcatccagcctttgtctttgtattcacctgtgtaatgtgcgcggtcgcagcggccgtaccacggttcaatgcagacaaaaggggcattctttgcaggcggagaccatagaccgactacgggagcatgaaagtgcaggcttaaataagctttcttttccttggtataaagggttactttatggatttgctcattctctattatcaaagcatctttatcgaaagtatgtgtatccaatggcaataacccgtctgtaagttccagagaatattcagtggaaggatctgcacatcctttttctgaaatgaggatatacttcaatccttcttccttgtcaaaaccgaagaaaccacgattctgtgtatctgcattaaaatccggccaatagaatgcaggatgcgcaccgatttgaaaatacatttctttttctccggtattcttaacttcccatataacctcgatctgcttaccctgaatacgataacctatttccagacaaaacgggaaaggaaatttccgtaatgtctcttcattactgacaaggtggtatcgtacttcgtcttctttttctgaaacaagagtaaattccatatcgcgggcaaagccatgttgactcaatgtataagcgataccttcattacgatactggttttcccacacacttcctacaatcgggaaaagtacaggagagtggcgtttccaaaaagcagggtcggcttgccacagatactctttcccattggcgaagatactgcaaagttcggctccatgcggagatacctgaatagtaagttgttcgttggagattgttttcatatcattcagttttctgttggttactttgagtgattatatgcttgttatatgaataatatccctttttacaaggacttaaattactatacaaaggtagtattttctatgattgagagagaatataatcccgactttcttatgatggagaattattcttataaaaccctataaaatagcgttctatgcaacatttcttacagcatttgaaacatttttttcagtcggttgacttaaatcaaccgtaatttgcatcatcgaaaagagaaaattcgtacttttaaattaataacattaaactaatgcctagtgtcatgaagaacaaaaaacttctttgcagcgtttgtttcctgtttgctttcatgtcggccctgtgggggcaaaacattacggtaaagggaaacgttacttctaaaacggatgggcaaccgattatcggtgcttctgtcgttgaaactacagctacaaccaacggaacaattacagacttcgatggtaatttcactctttcagttccggtcaactctactttaaagattacgtatattggttataaaccggtgaccgtaaaagcggctgctatcgttaatgtactactggaagaagatacccagatggtagatgaagttgtcgtaacaggttatactacacagcgtaaagccgacctgacaggtgctgtttctgtagtaaaagtagacgaaatccagaagcaaggtgaaaacaatccggtgaaagcccttcagggacgtgtccccggaatgaacatcaccgccgatggtaatccgagtggatcggctaccgtacgtatccgcggtatcggtacgctgaacaataacgacccgctttatataatcgacggtgttcctaccaaagccggtatgcacgaactgaatggtaatgatattgaatccattcaggttttgaaagatgccgcatccgcttctatctacggttcgcgtgcagcgaacggcgtgatcatcattactaccaaacaaggaaagaaaggacagatcaaaatcaatttcgacgcttctgtttccgcctccatgtatcagagtaaaatgaacgtactgaacactgagcaatacggacgagctatgtggcaagcctacgtgaacgacggtgaaaatccgaacggtaatgctttgggatatgcttacaattggggatataatgccgacggcaatccggtattatacggaatgactctttccaaatacctggattcaaagaatacaatgcctgtggcggacacagactggtttgacgagatcactcgtactggtgttattcagcaatacaatctttccgtcagcaacggttcggagaaaggttcttctttcttttctctaggatattacaagaatctgggtgttatcaaagacacggacttcgaccgtttctcggctcgtatgaacagcgattataagttgattgatgatatcctgaccatcggtcagcattttacattaaatcgcacgtcggaagtgcaggctccgggtggaattattgaaaccgcactggacattccttccgctattcccgtatatgcttcggatggttcatggggcggaccggtaggcggatggcccgaccgtcgtaaccctcgtgccgtacttgaatacaataaagacaaccgatacacttactggcgtatgttcggtgatgcctatgtcaatctgactcctttcaagggattcaatctacgttccactttcggtctggactatgccaacaagcaggcacgttacttcacttatccttatcaggaaggaacgcagacaaataatggcaagagcgcagtggaagccaagcaggaacactggacgaaatggatgtggaacgccattgctacctaccaactggaagttggcaaacatcgtggagatgtaatgataggtatggagttgaaccgtgaagacgacagccatttctccggatacaaagaagacttctctatccttacccccgactatatgtggcctgatgcaggtagtggcacggcacaggcatacggtgccggtgaggggtattcactcgtctctttctttggcaaaatgaactattcttatgccgatagatatctgctttcgttaactctccgtcgggacggttcttcccggttcggtaaaaaccaccgttatgccactttcccttccgtatctttgggatggcgcatcacacaggagaacttcatgaaagaactgacctggcttgatgatctgaaattgcgtgcttcgtggggacagaccggtaatcaggaaatctccaaccttgcccgttatactatctatgcacctaactatggtacaaccgattctttcggcggacagagctacggtacggcatacgatatcacaggttctaacggtggcggtgtacttccttccggtttcaaacgcaaccagatcggtaacgacaatatcaaatgggaaacaacgacacagaccaatgtcggtatcgacttcagcctgttcaagcaatcactgtacggttcactggaatactactacaagaaaacaacagatatcctgactgaaatggcaggagtaggagtgctgggagaaggcggcagccgttggataaattcgggtgcaatgaaaaaccagggttttgaatttaatctgggttatcgtaacaagactgcctttggactgacttacgacctgaacggaaacatatccacttatcggaatgaaattcttgaattgccggaaacggtagctgccaacggcaagtttggtggtaatggtgtgaagagtgtagtcggacatacttacggcgcacaagtcggttacattgctgatggcatttttaagtcgcaggatgaagtagacaaccatgctactcaagaaggcgctgctgtcggccgtatccgttaccgtgatattgaccataacggtgtgattgacgaaagagatcagaactggatttatgatcctactccctctttcagctacggattgaatatttatctggaatataagaacttcgatctgacaatgttctggcaaggcattcagggagtggatataatcagtgacgtgaagaagaaaagcgatttttggagtgcttccaatgtcggcttcctgaataagggaacccgtttgcttaatgcctggtcacctacgaacccaaactctgatattccggcattgacccgcagtgatacgaacaatgaacagcgtgtctctacttacttcgtagaaaacggttctttcctgaaactgcgcaatatccagttaggatacaccgttcccgctgttgtctccaaaaaaatgagaatggaccgcttacgtttctattgcagtgcacagaatctgctgaccatcaagagcaagaattttaccggagaagatccggagaacccgaacttttcttatccgatccctgtgaatatcacgttcggacttaacatcggattttaacttacttcatcaataaaacgaatgatcatgaaaaagataatatatatagcaacaatcggaattaccttgctgacaaccagttgtgacgattttttggaccgtcaggttcctcagggtattgtgaccggcgatcagatcgcttctcccgaatatgtagataatctggtgatttctgcctacgccatctgggcgacaggtgatgatatcaactcttccttctctctctggaattatgacgtacgttccgacgattgctataaaggcggttcgggaacagaagacggcggtgtgttcaacgcactggaaatatccaaaggtatcaacaccaccgactggaatatcaacgatatatggaaaagactgtatcaatgtatcacccgtgccaacacagccctgcaatcactcgatcagatggatgaaaagacctatccgttgaagaaccagcgcattgccgaaacgagattcctgcgcggacacgctcacttcatgttgaaacagctgttcaagaagatcgttattgtaaacgatgaaaacatggaaccggatgcttacaatgaactgtcgaataccacttataccaatgacgagcaatggcaaaagatagcagacgacttccagtttgcctacgacaacctgccggaagtacaaatagaaaaaggacgccctgcacaggcagccgctgctgcttaccttgcaaaaacttacctgtataaagcttaccgccaggacggagccgataatgcccttaccggaatcaacgaagaagacctgaaactggtcgtgaaatacaccgatcccctgatcatggctaaaggcggttacggactggaaacggactatagcatgaacttcctgccgcaatatgaaaacggtgcagagtctgtatgggccattcagtattctatcaacgacggtacttacaacggtaacctgaattggggaatgggactgaccactccgcagatactgggctgctgcgacttccacaagccgagccagaatctggtgaatgctttcaaaaccgattcgcagggaaagcccttgttcagtacctacgacaatgagaattacgaagtggctacagacaatgtcgatccccgtctgttccatacggtgggtatgccgggctttccttataagtacaacgaaggttacatcatccagaagaatgatgactggagccgcagcaagggactttatggatattatgtttctctcaaagagaatgtagatcccgattgtgactgtctgaagaaaggttcttattgggccagttctctgaatcacattgtgatccgttatgcagatgtattgctgatgcgtgccgaagcactgattcagttgaacgacggacgtatcaccgatgccatctcattaatcaatgaggtacgcagccgtgctgccggaagcaccatgctgatcttcaattataaagaagactacggagtgaacttcaaagtgactccttacgacctgaaagcttacgctcaggacgaagccatgaaaatgctgaaatgggaacgccgcgtagagttcggtatggaaagctcacgtttctttgaccttgtaagatggggagaagccaaagatgtcatcaatgcttattacgtgacggaagcatcccgttgctctatctacaagaatgcgggctttacggaaaataagaacgaatatcttcctgttccattcgaacagatcagcgcaagtaatggaaattatacacagaatttcggttggtaactaaccatcttaaaacaaagaatacaatgaaatcaatcataaaacaactttatactatcctgttggtgactgtggcatgccttacagtcacaggatgtagtgatgacttcaaatccggccttcgtctggacggagatgtttgggtgaactctatccggctggatgaatacgcaggaactgtcgactatcagaataaggcaatcgtagtaggagtgccctacgattacgatattacccgcatggtggtcacagaaatgaatctttccgaaggagccaaggctagcatcgctatcggtgagacaatcgacttttctcttcccgtatctttgacggtgaagaatggcgatgtacaaatgagctacacgattaccgtgaagagagatgaggcgaagatactgaccttcaaattgaatgatacttatgtaggaaaggtagaccagttatcgaaaaccatttctgtagtcgttccgctgacagtggatatcactcagttgaaaggtacgtttaccgtaacggacggagctaccgtgactccggcatccggaagtattcaggactttacgaaccccgtcacttacacggcaacttaccgttcggcagtaactccttatgtggtaacggttactcagggaaatgtgattccgactgcctttgtcggtacggcttcttccgtcagctttctgacgagtcccgaagagaaagccgctgcccaatggatgatggataatgtatcgatgtccgaatatatctcattcaaggatgtagtggacggaaaagtagatttaggtaaatataccgctatctggtggcatttccacgcagacaatggtgacaatcctcctttgccggatgacgcgaaagcggcagcggagaagtttaaagtctactatcagaatggtggcaatctgctgctgacccgttacgctactttctatatcgccaatctcggcatcgccaaagacgagcgtgtaccgaacaatagctggggaggaaacgaagactcgcccgaaatcacctctgctccgtggagcttcctgattaccggcagtgaatcacatccgttattccaggatttaagatggaaagatggcgacaagtcgacagtctatacctgtgatgccggctatgcgatcaccaatagcacagcgcaatggcatatcggaacagattggggagggtatgacgacctgaacgcatggcgtaacctgacaggaggaatcgatctggcacatggaggcgacggagcggtagtcattgccgaatttgagccgcgttccaatagcggacgtacgctctgtatcggttccggttgctatgactggtacggcaagggagtagacgcttctgccgactactatcactataacgtagagcaaatgactctcaatgcaatcaactacttgtgtaaataaaaagaataagcaacaatgatgaaaaatatgatcttacctatagcatttaccgcactgatagcttcgatgactgcttgcagtgacgagactgaccccatcttgactcagaaagactgggacggtacagccacatacttccaatcgagtgatgagcatggcttctcgatgtactataagccacaggtcggctttgtaggtgacccgatgccattctatgatccggttgccaaggactttaaagtgatgtacctgcaagattaccgtccgaaccccgaagctacgtaccatcccattttcggggtggctaccaaagacggtgctacttacgaatctctcggcgaactgatttcctgcggagggcgtgacgaacaggatgctgccatcggcacaggaggaacgatctataaccctgccgacaaactgtattataccttctacaccggtaataagttcaagccttcttccgaccagaatgctcaggtagtgatggtagctacttctcccgatttcaagacatggaccaagaaccgcaccttctacctgaaaggagatacgtatggttatgacaagaatgacttccgtgacccgttcctgttccagaccgaagacggtgtgtatcacatgctgatcgctacccgcaagaacggaaaagggcatatcgccgaatttacctctgccgacctgaaagagtgggaatctgccggaacctttatgaccatgatgtgggatcgtttctacgaatgtccggatgtattcaagatgggggactggtggtatctgatttattcggaacaggcttccttcatgcgtaaagtacaatatttcaaaggcagaacgctggaagatttgaaagcaactaccgccaatgatgccggaatatggccggacaatcgtgaaggaatgctggacagccgcgcattctatgccggaaagaccgcttccgacggaacaaaccgctacatttggggttggtgtcccacacgtgccggaaatgataatggaaatgttggtgatgtagaacccgaatgggcaggcaatctggtagcacaacgtctgattcaacacgaagacggtactttaaccctcggagtacccgatgcaatcgaccgtaaatacacttccgcacaagaagtgaaagtaatggcaaaagatggtaacgtgatcgaaagcggtaaaacctatactttgggcgaaggtgcctccgtcatcttcaaccgtctgaaagtacataacaagatttctttcaccgtaaagaccgcttcgaatacggaccgtttcggaatctcttttgtacgtggaacggattccgcttcctggtatagtatccatgtcaatgccgatgaaggcaaagcgaattttgagaaagacggtgacgatgccaaatacttattcgataataaattcaatattccggcagataatgaatatcgtgtgacgatttacagtgaccagtccgtctgcgtgacttatatcaacgaccagttatctttcaccaaccgtatctaccaaatgcagaagaacccgtggtcactctgctgttataaaggtgaaataactgtatcagacgttcaggtaagcacttattgatgaaaactacaccggcaagtaacatcttttacagcgtttgaaacaaaagtgataggcgctaaccttggaagcgcctatctttgcactgtaacaactatcaaaagtataacaaccttaataccatagaacatgaatgtatttttgcctgtcaaacaacttcagacctttctgatttgttttattctcatgactatttctgtttcaacccgagcggcggattctcctttgctgattaagaatctgggagaaggtcattgccttgtacgtgtcaatacttcccagaagtacctgcttctgcccgtagaggatgcgtctcccgatgtacgtatcagcatgatcgttaataataaagaggtgaaaaacttcgacgtgcgtctcgccatacataaagtagattactttgttccggtagacctttccgacttttccggcaaaacggtctctttcaagttcaagatgaactccaacgatccgatccgtgtcaatctttcgccggataataccgcttgctgcaaggaaatgaaactctccgacaccttcgatacgaccaaccgtgaaaagtttcgtccgacctatcacttctctcccctttacggatggatgaacgacccgaacggaatggtctataaagacggtgaataccatcttttttaccagtacaacccttatggctccaaatggggaaacatgaactggggacacgctatcagcaaagacctcgtaaactgggaacaccgcaccgttgcgatagcaccggatgcgctcggtactatcttcagcggctctgccgtggtagatcataacaatacagccggcttcggagcaggcgcaatcatcgccatttatacacaaaacagcgaccgtcaggtacaaagcatcgcttatagcactgacaacggacgcactttcaccaaatacgaaaacaaccccgtacttgtatccgaagctcgtgacttccgcgacccgaaagttttttggtacgaagcaacaaaacgctggatcatggtgctcgcagtgggacaggaaatgcagattttctcttctcccaatctgaaagactgggcatttgaaagcagcttcggcgaaggatacggtgctcacggcaacgtatgggaatgccccgatttattcgaacttccggtagagggcaccaacgaaaagaaatgggtattgctttgcagccttggtgacggtcctttcggtgactccgctactcaatactttatcggtagcttcgacggcaagaaatttagttgtgacaatcagccgaatgtcacaaaatggatggactggggaaaagaccattatgctacagttacttggagcgatgcccccgacaaccgccgtatcgccattgcatggatgagcaactggcaatatgcaaatgacgtgccaacttctcaataccgtagtccgaactccatccctcgtgatttgagtctctttgccatcgacggtgggatttatcttcaatccgctccttctcccgaattactgaaactgcgtggtgtttccaaaaagcgctcattcaaggttaacggaacacgtatcgtgaaagatttgattccgaacaatgaaggtgcttacgaaatagaactgtccctcaagaatcagcaggcagaaatcatcggtttccgtctctacaatgacaagggcgaagaagtagacatgcagtacgacatgaaagagaagaaattctcgatggaccgtcgcaagagtggcgaggtaaatttcaacgaaaacttcccgatgctgacttggactgcgattgaaggggataaggatgaaatgaaactccgcctgtttgtagacagatcaagtgtagaggctttcggtgacggtggacgcttcgctatgaccaatcaggtattcccttcggaaccttacaatcatatcagcttctacagcaaaggcggtgcctataaagtagattcattcgtggtttacaaactgaagaaataaaaaacgactttcttctccctgcgctctttttaattcacgctaacatacctttatccttgcgttaacatgcctttatgttctccttatgtatgggagatagatagcgtttcacctacgtgatacgatctgttcattactgtgataaggccttatcacccttgtgatacggtctgttcacagccgtgataagcaaagaaaataggaggctaaaagaaaaaggatcaataggaaaggaaaataattactgtgctaatatacgaaattataatagataaaacaatggaaaatactaaaaacgcttctctctccaagctagtcccggtgatgctttgtttcttcgccatgggattcgttgatctggtgggcattgcctccaattatgtaaaagcagacctgggtctgacagactcacaagcaaacatcttcccttcattggtgttcttctggtttctgattttctccgtaccgacaggtatgctgatgagccgtatcggtcagaagaaaaccgtgttactaagtttgatcgtgacttttgcttctttactgttgcctgtcttcggggacagttacgcactgatgctgatttctttttccctgttaggtattggaaacgcactgatgcagacttcactgaacccgcttctttccaacatcgttcgtggtgaccgtctggcaagcagcctcaccttcggacaattcgtgaaagcgatcgcttctttcctagcaccgtacattgccatgtggggggcaacgcaggcgattccttctttcgatctgggatggcgtgtattattccctatttatatggtaatagccatccttgccattctgttgctcaacgcgacacagattgaagaagagaaggaagaaggcaaaccttccactttcggacagtgcctggcattgctcggcaaaccgtttatcctgctttgctttatcggaatcatgtgtcacgtaggtatcgacgtcggtacaaacactactgcacctaagattctgatggaacgcatcggcatgacactggatgatgctgcttttgcaaccagcctctattttatcttccgtacggcaggctgttttctgggatcattcatcctgcgtcagatgtctccgaaatctttcttcggtatcagtgttgttatgatgctggctgctatggtagggttgttcatcttccatgataaggcggtgatttacacttgtatcgctctgatcggttttggtaactcgaatgtgttctctgttattttctcgcaggcattgctttatctgccgggaaagaaaaacgaagtttccggtctgatgattatgggactcttcggaggaaccgttttcccgttggctatgggagttgcttcggatacttctatggggcagaatggtgcgattgctgtgatgacagtcggtgtactttacttgctgttctataccttccgtatcaaaaaataattttatatttggaaaacaattaaatctgtagatcatgaataatataattgtaggaatgggcgaagcattatgggatgtattgcccgaaggaaagaagataggcggtgctccggctaatttcgcttatcatgtttcacagtttggtttcgacagccgtgtagtaagtgcggtgggcaatgacgaactgggagatgaaatcatggaagtattcaaagaaaagcaactcaaaaatcagattgagcgggtggattatcctaccggtacggtgcaggtgacactggatgacgaaggggtgccttgctacgaaatcaaagaaggagtggcatgggataacattcctttcacggacgaactgaagcggctggctttgaatacgcgcgccgtttgtttcggttcgttggctcaacgcaatgaagtgagccgtgctacaattaaccgattcctcgatacaatgcccgatatagacggacagctgaagatattcgacatcaacctccgtcaggacttctacacgaaagaagtattgcgcgagtctttcaaacgctgcaacattctgaagataaacgatgaagaactggtgacaatcagccgtatgttcggttatccgggcatcgacttacaggataagtgctggattctgttggccaagtacaatctgaaaatgttgattcttacttgcggtatcaatggtagttatgtgtttactccgggagtcgtttcttttcaggaaacgccgaaggttccggtagccgatacggtaggagcgggggattcctttactgccgctttctgtgcttccattctgaatggcaagtctgttcccgaagctcataagctggctgtcgaagtttccgcttatgtttgtacgcagagcggtgcaatgcccgaacttccggttattctgaaagacagattgttgtagaatctctttaaattcaaaaagaaggtgtgtcaaaagcaactaaactctcctccttcctgaaggaggggaatttagttgcttttgacacatcttcttttctgtttcttatttcagtaaatatcccccttccctgtgttttgatttactacttaatctgttaattattagaatgataataacagatgttcttttctctaattgtccccctctttctttccttgttttataagccgattgcctatctttgcggcaggtctttaaataataaattaaaaagagaaaactactttatgaaacacatttcaaacttcctcagatcaaaaagctggaacgtatttttgtttttatatcttgctcttcctttgtttgcgcaaaaggaatataagatcgatcaggtatccgttgtcaatgtaggcgatggcagactgttgtttcgggaactgaaaacggaaaaagcattgaatggcgaacatcgcatcatagatggttatcattccgcctatgtgctggcatcttttaaagatggtttttatgatggcggatacaaagaatatgtggacaatatattaataacggaaggaagttataaagaagggcggaaggatggcctcttcaagattaactccaagtttgacggtaagctgaaagaagaaaagtcctataaggaaggtaagctggacggtacgagcaaaagttactttactaccggaaaagtggaaagtgaaagaaacttccggatggggaaagagcacgggaagcaactgtcgtacgaatctgacggtactttgcggaaagagcataattacaaggacgggaagcaggtaggcaaacagtatacttttctgaaaggtacatatgatttgtatgagaccgtttatttcaatgaagaaggtttgcaggacggtgaatattcgtccgtgtttacgtttggctcgccacgtatactgggtagttataagaatggaaagaagaatggtcggtggactacttttgctgaaagcggagatacgctgatgattgaaacctatctggatggaaaagaagatggactccatgtctcatttgccaacggaagtggggtaaggcagaaagaatattatatgaagaacgatcgtaaagacggtttataccgtgaatataatctggaaaatggtgaattgagatatgaagctacctatcaggccggcagattgcatggcaaggaacgacggctgatagtgagcaaccgctttgattattgggaaacttctacctatgtgaacggaaggcagaacggaccgttcgaagctcgttatgtaaagaatgaccagcttcgtgaatgtggggaatataagaatggtcgccgtgtaggacgatggaaacgctacactattgatggtaaactggaaaaggaatgggatgaaaactaaccggtagatgaaaggtcagggcataaaaaaaggagcaacgccttgctccaacctttgttaaccttaaatctaatactatgaaaaacacagtgcaaagatacggacttctgtgaaatctgcaaattatccaagtaaaacgctatgttttataacattgattaagtgtttgttttacgctttatacttttgttaatactttccgatggtctgaaagaggactgctttccttctttttagaataataaatagctgaagttagagaactttacagtattatttcttatttttgttcttaattggattacagaaagaactacgaaatgatgagatggatgaagacgatgagatatctgaagtggatgctggtgctgttttgtttaatcgggatgacggcttgccggcaggatacaccccgttttcgtattggggtggctcaatgcagcgatgattcatggcgacataagatgaatgatgagattcttcgggaagcaatgttttataatggcgtttcggtggaaatccgttcggcaggagatgataacagtaagcaggcggaagatgtccattattttatggacgaaggagtcgatctgctgattatttccgctaacgaagctgctcctatgactccgattgtagaagaagcttatcagaaaggcatccccgttattcttgtagaccggaagattctttcggataaatatactgcctatatcggagccgataattatgaaatcggtcgttcggtaggaaactatattgcctccagtctgaaagggaagggaaatatagtagaactgacaggattgagcggttcgactcctgcaatggaacggcatcagggatttatggctgccatcagtaaattcccggatataaagctgattgataaagcggatgctgcgtgggaacgtggtccggcagagatagaaatggatagtatgcttcggaggcatcctaagattgatgctgtgtatgcccataatgaccgtatcgctccgggtgcctatcaggcagcaaagatggcagggcgggagaaggaaatgatttttgtcggcatagatgccttgccgggtaagggaaacggactggaactggttttggacagtgtgctggatgccacctttatctatccgaccaatggcgataaggtactgcaactggctatggacattctggagaagaaaccctatcccaaagaaacggtgatgaataccgctgttgtggaccgtaccaacgcacacgtcatgcagttgcagactacacacatctccgaactcgataaaaagattgaaacgctcaacggacgtatcggtggatacctctctcaggtagctacacaacaggttgttttatacggcagtctgattatccttttattggtagccggtttattattggtcgtttataaatcactccgctctaagaatcgcttgaataaagagctttttaagcagaagcagcaattggaagagcagcgtgacaaactggaagaacagcgtgaccaattgatacagctctctcatcaactggaagaagctacccatgccaagctggtctttttcaccaatatttctcacgacttccgtactccgttgacattggttgccgacccggtagaacatttattggcggacaagacattgagtggagatcagcaccggatgctcatgctgattcagcgaaatgtgaatatccttttgcgcctggtcaatcagattttggatttccgtaaatatgaaaacggcaagatggaatatactccggttacggtggatgtcctttcttctttcgaaggatggaatgagtcctttcaggcggcagcccgtaagaagcatatccatttttcttttgatagtatgccggatacggattatcatacactggcagacatggagaagctggaacgtatttatttcaatctcctgtccaatgcctttaagtttacaccggaaaacgggaaaatagccatccgtctgtcttcccttagtaaagaggacaagcgatggatacgtttcacggtggcaaataccggttccatgatttctgccgaacatatccgcaatgtattcgaccgtttctataagattgatatgcaccataccggttcgggaatcggactggcattggtaaaagccttcgtagaaatgcacggtggtatgatctccgtagagagcgatgagaaacagggcacggtctttaccgttgaactgcctgtacagtcttgtgaggctgttgctgccgaaccggataccacccttgtttctgcggattcccgtacaacagatgttctattggcagaagaggaagaactggaaaaaggatatgactcttccaaaccgtccgtactgattattgatgataatgaggatatccgttcgtatgtccatacgctgttgcatacagactatacggtgattgaagcggcagacggctccgaaggaatccgtaaggctatgaagtatgttccggacctgatcatttctgatgtgatgatgccgggcattgatggcattgaatgttgccgccggctgaaaagtgagttacagacctgtcatattccggttattctgctgacagcgtgttcactggacgaacagcgtattcagggatatgacggtggtgcggattcttatatttcaaagccgttcagttcacagctgttgctggcacgtgtccgcaatctgatcgattctcaccgtcgtctgaaacagttctttggtgacgggcagacattggcaaaagaagatgtctgcgatatggacaaggattttgtagaaagattcaagtcattgattgaagagaaaatgggagactccggtttgaatgtggaggacttgggcaaagacatgggactaagccgtgtgcagctttatcgcaagattaaatcattgactaactactctccgaatgaattgctccgtatcgcccgtttgaagaaggcagcttctttgcttgcttcttcggacatgaccgtagcggagattggttatgaagtcggtttcagttcaccttcttatttcgccaagtgctataaagagcagtttggagagagcccgacagatttcctgaaaaggaaaggatgatttcattgatatcgtaaagagggatatatgaaagattataaagtagataaagagagcttttccgaatcctttcggaaggaagtgtacgaagtcgtatcccagatacctgtgggaaaagtatctacttatggaggtattgctttgctgttgggggcaccccaatgctcgcggatggtgggacgtgcattgaaagaagtgccggatgaattatccattccctgccatagagttgtaaattccaccggaaggctggtgcccggttgggtggaacaaaaacaactcttgctggcagaagaagtttctttcaaagctaacggatgcgttaatctgaaagaacatttgtggcacgtggatgaatgaaggatgcaaggaaggtaagccatatcatccgtatccatacaataaagaaaacccatacatgaagccataaggtcctggtaatgaaatctctgatgggtacagggacgaatatgtcgataggaacgatacataacagcacaaaacagcaccaaaatagaatcttgtctgttgcggtacgtgttggtctgctccaataccagagcatgaaacctgccaatgcgataatataggtatgcttctcggcggagtcactcagtaatactacccagcccatgagaatgcccaaagcctgggcacggaaggcaaaagacgaccatttgcggaaattccccaaaaagagcagagtcagcaagccgagcattcctatctgaagtgcacggaagtgtggcaatgtccatgctgcaatggggcgggcatagaaaaatgaatcataagctccggcggactgatgaacagcaagactatggcaccattcttcataataggggagcaaatctgcaggagctatttttattaacggtaatgcaagcaatacaatgcccattgtaacggcatagccaaagttacgccatacgtgaggatagcacagcaacaatgccagttcgaaaattccatatactttggtacatcccgaaatcatgattaacagaacagccagaaatccacggtctttttccaataacgtataggcgaataagaataaataggctaccgttatgttatactgaaatgaaagtaaactttgtcctaaaatcagtaacagaaaaaggaacatacggcatttctgctgctgggtgaattgttggggcagcgtgaagatcgccataaagaacagcgaataattgaatagattccacgcgaaaggtcccagccatgcaggcagatacgcaaacggagcgaacaataccgtgaaaactggagaataaaggaagtagcgtccgtgagcttctacaaattcagttgtgtatgggctgatgccttgccagaagaattgagtagcgtccgagaagaccataaagttttgatgccgtcctcgtataaattcgagcagagtcactataaaagcgagcaggaaacctatcatgtagagattccgccggctatagaaaaacggcattttggggttctttttactaaggaactgtacttggcttttgtcgtctagtgtggcagtacctgtttgtttttcttttgttgtgtaatgacaattatccttccccaggaaaattgtaatagccctgttgaacatataaatctagtttagttattgacgccaaatatacggtgtttaagtgaaatattcaaacttattttatatttatctgccggtttgttctattttgctgagtgataggggaatattacccggaaactttccatatcattacaaataaagccctctgtatgccccggattttgaatataatttgtatgtttaatccgttttttgtatctttgtgccagcaagatactggaacaggctgtttttatacataaaaatgctattttttgctattcgttgaaaggattatcttatcaaattctattccttttttaattactcagtctgtcaataatcattttattaattatttcgggattcattgttatttgtcccttatttaaatcagaactttatacgatataaagaaagattcctgttatcgtttgttcttgtcttgctgtgtatattattttaataacctaaaccattttattgtatgagtaaaatagaaattaaagatctctatctggtttttggcaatgagaagcagaaggctttgaagatgttgaaagaaggtaaaacaaaaagtgaaatattgaaagcgaccggatgtacagttgcggtgaaagatgcgaatctttccattaatgaaggcgaaatattcgtcattatggggctgtccggtagtggaaagtccactttactccgctgcatcaaccgtttgatacgccctacttccggagaagtgattatcaatggaacagacatagccaaagtgtcggataaggaactgttgcagattcgccggaaagaactggctatggtctttcagaacttcggtctgcttcctcaccgttctgtcttgcataatatagctttcgggctcgaactacagggagtaaaaaagggagaacgggagcagaaagcgatggaaagtatgcaactggtggggctgaaaggctacgagaatcagatggtaagtgaactgtcgggtgggatgcagcagcgtgtcgggctggcgcgggctttggccaataatcccgaagtcctgttgatggatgaggccttctcggcactcgatcctttgatccgtgtgcagatgcaggatgaactgctgactttgcagtcgaagatgaaaaaaacgattgtctttattactcacgacctgagtgaagcgattaaattgggtgaccggattgctatcatgaaggatggagaaattgtacaaatcggtacatcggaagaaatcctgaccgaacctgccaacgcttatgtagaacgatttgtggagaatgtagatcgaagcaagattataacagcttcctctgttatggtagataaacccatagtggcacgtttgaagaaagaaggcccggaggtgctgatccgtaagatgcgcgaacggaatctgaccgttcttccggtagtcgattccaataatctgttagtaggagaggtgcggttgaatgacttgctgaaactacgaaaagagcaaatccgctccatcgagtccgtagtaaggcatgaagttcattcagtgctgggtgatacggtgctggaagatattcttccgttgatgacaaaaacgaactcgccaatctgggtcgtaaatgagaatcgggagtttgaaggcgtagtgccactttcctcattgatcatcgaagtaacgggaaaagataaagaagaaattaatgaaatcattcaaaacgcaatagaattatgataaatatcggacaatatatagagactgccattaattggctcacagaacattttgcttccttttttgatgctctcagcatggggatcggaggattcatagacggttttcagcacgtactgtttggaatacctttttatatcacaattgcagtgctggctgcgctcgcctggtttaagtcgggtaaggggacagccgtatttaccctcttgggtttattgcttatttacggcatgggcttttgggaagaaacgatgcagacattggcattggtactttcttccacttgtctggcattgcttttaggcgttccgttgggaatctggactgccaacagtgatcgttgtaacaagataatgcgccctgtcctcgactttatgcagacaatgcctgcctttgtctatctgattcctgccgttctattcttcggattgggaactgtgccgggagcttttgccaccatcatctttgcaatgcctcctgtggttcgtctgaccggtctgggcattcgtcaggttcctaaaaacgtagtagaagcctcccgctcttttggagctactccctggcagcttctttataaggtgcaattgcctttggcgttgcctactattctgacgggaatcaaccagacgatcatgatgtcactttcgatggtagtgattgctgccatgatttctgccggaggattgggagaaatcgtgctgaaaggtatcacccaaatgaaaatcggactcggatttgaaggcggtatcgcagtcgtgatattggcgatcgtgctggaccgcatcactcagggtatggcagataacagaaaaagtaaaaagaaataagaatcacaccaaagaaaggaataatcaatgaataagataaaaatgattgcggcaatgtttattgccggcatactcttaaccttcgtttcctgcggagacaacggaaagagtaagaagataagtatcgcttatgccaactggtcggaaggtattgcaatgacaaaccttgccaaagcgatttttgaagatcaggggtacgatgtaaagttgctgaatgccgaccttgcacctatatttacctctatctcccgtaagaaagcagacgtatttatggatgtctggatgcctgtcactatggaagattatatgaaacaatacggggataaactcgaagttatcggggatatttatgatggtgcccgtatcgggctggtggttccggattacgttacgatcaactcaatcgaagaactgaacgcggaaaaggaacgtttctccggtcagattgtcggtattgatgccggagccggtattatgaaagctaccgatcaggccatcaaagactatggattggattataaactgatgacttcgagcggacctgccatgactgcttccctaaagaaagcgattgataagaaagactggattgtcgtgacgggatggacgcctcactggatgttcgaccgtttcaagctgaaagttcttcaggacccgaagctgatatatggaaatacggaatccattcataccatagcatggaaaggttttagcgagaaagacccttttgctgccgaacttttgggcaacattcgtctgacagatgcggaaatcagctccttaatgactgctctggaagaggcgcagacaacggaaagacaggctgcccgtcaatggatggaagaacatcaggaactggtgaacagttggattcctgagaaagattgatatgcaaacactacttcaaccatcccgccattctttctttaccatagaagtagtagaaaagtagtcccagccagctggtaagaacgattaatacaatcgctataagtcttttctctacagccgcatttatattccaaatctctatggcagctctgaaagtcagtatcaaaccgataatccaaataacaaatccgatcatatctttagagttttaatgaatatcttcgtgagaagtaatcgttacttctaagatataaacaaaaaaggcaggaatctgtttccaggattcctgccttttattatgtacaaagtatttctacttattattcagctgtatcagctccccagttttctctggcaagacgtttgtagctgttgtaacgccatttagcgttttcttcagcagctttaaacagttcttcagcttcagcaggatattgtttcattacagaagcgtaacgaacttcacccttcaagaaaccttggaagtcttcccagttaggttctttgctatccagttggaacggattcttgccttcttcttccaaagcagggttgtaacgccacaagtgccagtaaccgcacttaacagccttttcttcttcttcctggctcttacccataccggctttcagaccgtggttgatacatggagcgtaagcgatgatcagtgatggtcccggatatgcttcagcttcacggatagctttcagagtctgagcctggtcagcacccatagcaatctgagcaacatatacataaccgtaagtagtagccatcagaccgaggtctttcttacgtacacgcttacctgcagcagcaaacttagcgatagcgcctaccggagtagctttagaagactgaccacctgtgttagagtaaacctcagtatccaatacaaggatgttaacgtccttaccggaagcgattacatggtcaagaccaccgtaaccgatatcataagaagcaccgtcaccaccgatgatccattggctgcgtttaacaagatattgttgcagatcagcgatttgcttgcagtggttgcatttatctttagcagcttctaccatcggaatgatcttttcggccagttccttagtcttttctgcatccagcatattgttgatccattcagcaaatacttctttgtattcagccgggcagcaatcagaagcgatagcttcgttcattactttcaccagacgggcacgcatcttttcgttagccagttccatacccagaccaaattcacagaagtcttcgaacaaggagttagcccatgcaggaccgtgacccttttcgttcatagtgtacggagtagaaggaactgaaccggagtagatagaagaacatcctgtagcgttagcaaccatttcacggtcaccgaacaactgagaaatcagtttcacgtacggagtttcaccacaaccggagcaagcgcctgagaactcaaacaacggagttgcgaactgagagttcttcacgttagccttgatgtctaccaggtgttgtttgctcttcacgttttcagcgcagtaagtccagttatcagcttcggccaactggctttcaaggtgtttcatggtcaatgccttgccacccttcttcggattacccggacagatgtcggcacagttaccgcaacccagacaatcgagaacgtctacctgaatacggaatgtcataccatcgaatgctttacctacagctttcagttgctcgaacttagcacccttctgctcttcagcatcgagtacgaacggacggatagaagcgtgaggacaaacgtaagcacacttgttacactgaatacagttttcagcattccattcgggaacgaatgcagctacaccacgtttttcgtatttggaagtaccttgataccaagtaccgtcttcgatacccttgaatgcagataccggcagcaagtcaccgtcctgtgcattgatcggacgaactacttcgttgatgaaagcaggatcattgttttctgcttttgcatcatccggcaggttagcccaagcaggatcgacagtcagagtcttgtattcaccaccgcggtctacagcagcgtagttcttgttaacaacgtcttcacccttcttgccgtaagacttaacgatgaatttcttcatctgttcaacagcttgatctacagggattacgcctgtgatacggaagaatgcagactgaaggattgtattggtacggttgcccaaaccaatttccattgcaatctgagttgcgttgatatagtatacagagatgttgttctgtgcaaagtatttcttcaccttgttaggcaggttcttagccagttcttcgccttcccagatggtattcagcaagaaagaaccgttcttacgcaaaccacgtgttacgtcgtacatgtgcaggtaagcctgaacgtgacaagcaacgaagttcggagtatttaccaagtaagtagaacggatcggagtatcaccgaaacgcaagtgagaacaagtgaaaccacccgacttcttggagtcgtaagagaagtaagcctgacagtgtttgtcggtgttgtcaccgataatcttaacagagttcttgttggcacctacagtaccgtcagcacccagaccgtagaatttagcttcgaacataccttcaccgcccagagcgatttcttctttctgaggaagagaagtgaacgtaacgtcgtctacgataccgatagtgaagtggttcttcggcattggcatagccaagttttcgaatacagagatgatctgtgccggagtggtatcttttgaacccagaccgtagcgaccgccaacgataacaggagcattttctgcgccatagaagcagtctttaacgtcaaggtaaagaggttcgccgttagcacccggttcttttgtacggtcaagcactgcgatgctctttgcagtcttgggtacagcagccaggaagtgtttagcagagaacggacgatacaagtgtacggcaaccatacctactttttcgccgtttgctaccaagtggtcgatagcttcgcgggcagcttcagttacagaacccattgcgataattacgcgttctgcatcttctgcaccgtagtaatcgaacaaaccgtatttgcggcctgtgatcttggaaatttcgttcatgtattcttctacgatagcaggaactgcttcatagtagttattgcatgattcacgatgttggaagaagtggtcggggttttcagccataccacgggcaaccggcttcatcggattcagtgcacgggcacggaattcagccaaagcttcctggtcgatcagcggagcgaggtcgtcgttttccaacatttcgatcttctggatttcgtgagaagtacggaaaccatcgaagaagttcatgaacggaacgcgtgatttgatagtagccagatgagcaacacctgccaaatccataacttcctgtacagaaccttctgccaacatagcgaagccggtttgacgagctgacattacgtcctgatggtcaccgaagatacacaatgcgtgagaagccagtgtacgagcagaaacgtggaatacacaaggcaagaattcaccggcaatcttgtacatgttagggatcatcaaaagaagaccctgagaagcagtgtaagtagtagtcaatgcaccagcctgaagagaaccgtgaactgcaccggcagcaccaccttcagattgcatttcctgtaccaatactgtttcgccgaagatgttcttacgtcctgcggcagcccattcgtctacgtactcagccatagtcgaagaaggagtgatggggtagatagctgctacttcagagaacatatacgagatatgtgctgcagcttggttaccatcacatgtgatgaatttcttctgtttagtcataactaaattaaatatttaagtaaataaatctttttagtataagaatccgaacatccaaagaggtatttggttgccgcggcctatctcagccttttgcaacgcatacgtcacgtccgggttattctttatttttgtaccttccgcacaaattttgaacggcatcacttcgtctaccatgaaagagacgtttttatctcctttatgtaccttatggtctttccataaagtgttaacgaagaacgtgtcgagtacatcctgttcttccactttcaccggataaatggagtacatcaggttagagttgtgcatcataatctttgacggtttctttgggaattcttctcctttcgggtaaaccagattaatcagacgcgcgtctgccagatacttgatatagttcattaccgtagcgcgggatgtctgtacgtcacttgccagttggctcacgttcggagctttcggtccgtccacagccaacaaatatagtaatttttttatctttgaaagatatttcagctcaatttgtttgatcagcaagatatccacttctaccatcatgttcattgttttcagcagattctccgagaaattacgtttttcaaggaagaaagggtagaaaccatgatgcaggtaatcctgaaaataatccagcggtcgtactttggaaagtactcctttggctatctgttcatgtgtactgaggatttcttcgaggctgtatgcccggaatttcattcctgtctgcaggttcagaaattcacggaaagagaatccgcgcaggttataacttttcgcaatgtcacgcaattcgaggttttcctctttgagtcgcatgacggaagaaccggtgaagacaatcttcaggctggggaaacggtcatagcacattcgtagctctttgctccattcgggatgtttgaacacctggtcgatcagcagtacttttccgccacgtttctgaaactcgttggcgaagtcaacaaggctgtgaccggagaaataaaagttgttcatattgatgaacagacaggaacggtcggtgccgaatttctctttggcgtactgcaggaggaaagtggtttttcctacgccacgtgtccctttgataccaatcagacggtcactccagtcgatctcgtccataagatcgcggcgaacgggggcattggtgtgctcaacgaggtaggcgtgtgtgcgatagaatgattccatttcgtttctttgtttttcggctggcaaatatagtgctttttttaggatttgcaaagtagagatagcaaaaatgtgctttaatttataagtttctctttattgtgtaagttcctgattatttcctgtatatatttgcagaataatgtgttgaatccatctttgacatgacgaaaagacctgtttatatattcaatccggagcatgatatggcgttggcaagcggtgagacgaactatatggcgccggcttccgcccgacagatggcgagtgacctggcgttgcttcctatgtggtatgccgaagcgggaagtgcggtgcttgcaccgtctgcttataatgcggacttcctgaaaacaaagagtgaacttttgggcatggatgtggccttgttgacggaaccggaagtggctgacggtaaagactggaagttctctccgtggggttgggaccctgctttgcggaagcgtttgatgacattgggggcaggtcagacggagctgccttctgcggattatatgaatattctgagagagcattcgcatcgtctgcaggcggtaaagttgttgcctgggttgcggttgaatgaatacttctgtggagaatctttttatttgagtactttggcggagtgcagtgcgttcgtcgaagggcgggaagcgtgcttgttaaaagctccgctttccggaagcgggaaaggattgaattggtgtaaaggcatatttactacttttatttccggttggtgtgcccgtgtcgctgcttctcagggtggggtggtaggcgaacctatatataataaggtggaagatttcgctatggagttttatgctgacgggagaggaagggttgtttttgccggatattcggtcttccacacgggtgggagtgggatgtatgcagggaatgacttgctgtctgacgagaagattctgcagaaactatcggcttatgtgccacaagaagaatttatcaggctgcggactcgtttggaagaagaattgtcagctttgttcggtggcttttatcatggatacttgggagtggatatgatgatttgtcattttccggatgaagcgcctgtttaccggattcatccttgtgtcgaaattaatctgcgaatgaatatgggggtggtggcatggctcttgacggatcgttatttggctgcggatgcggaaggagtttttcggattgattattatcctttagccggtcaggctttggaggaacatcggcagatgtcggcttcgttccctttgtccgtagagaataatcgggtgtgtgccggatatttgccgttagtaccggtgacgcctcaaagccggtatcgtgcgtttcttttgcttactctcccccagtgaaaaagatagtgcttttgctctcatgctctaacagttcgtctgtatccctttattcatcgatgttttagctgttagagatccagtggtagcagagtgagagcaaggacttgctctcactctgcatcgtcctgataaataccgtttttactgtgttattctttgatttacaggatgttaatatctgatatctcaactgttaacgtttgatttctcagatattaataattgagaaatcaagtattaaggactgataatttatgtattattgactgatatatgatttaatgttttcagagagagcagtactattgaagtagctgatgcgttcaatgtgattggaacatgcggttaagtcaatcaaatcaacagtagtttcagatagtttcgagcgtttggaactaaagtttcaagcgtatgaaactctagtttctcaccgatgaaactacagtttcacaccgatgaaactctggtttcaagcaatggaaactctttgaagatactgctaaattggaattggtgaacatcggaaaagtcatattgtggtaatactgtctgaaatgcctacttatctccatttatgggtgcactctcattcccgcaacggtcgatagccgttactgcaaaatacttcttggcattccaaggctggatgggtgcataaatgtaacttgtttcacgaatactttgtgcgacaatattttccgctttctttgtatctaccggatattcattggaagcataaatcacgtacatcggtttattccgttggtcattatccgtcgctggttgccagttcaattcggtatatccgttgtcgatggacgtaactttgagtgctgagggggcagacggcggaacgttatccaaccatgtcatcgggggctgtaatgccggataggcatagaagttctcaatcagttcgtcataaattccctgagtattgtccatcagatacttgacacggtaatgcccttctcctgccattttctgattacggatgaaattaatctgacgatccacttcgtcgcgtgtccacttcccttcgtcgggatggaggaaatagatgcccagccccggaataacctgtcgtccgttgctctgttcctgccagtcgagcgcgaaaggatagaaactgtttccctgaaaatacatcatgggatatatctgatcctgaataccttctccgagccatccttgcgggtcttgataaacggtatagaacgcattccaaccacgggaagaatagcgggaagtatctctgtattttcctacagggcaagtacttacctttacccacggcttcattgctttcacacctttatatatgtaccggacgatttcggaaatgttatcccgtcgccattgatccaaagtacgtcctttgctgtaacggcggaaatcgtatttgtcggggaatagaggagcattctccggatagcgcaggtagtcgaaatgcactccgtctatatcatagcgctccaccacttcacgaacgagtctcatgagatactctttcgtagcaggatgccccggattaaggaaatattcatttttataaggcacgcatatatctttcactcgcttggtgacagattgtttgccgagagaagcgacgtgctttttgttgcctagcggaatagtcaccatccacgcatgacattccatcccccgcttgtggcattccccaatcgcaaaagccaacggatcatatcccggatttcctccgacttttccggtcaggatagaattgaacggttcgatggaagaaggatacagcacatctccgcgtgtacgggtctgaaacaggacagtattgaagttggcagctttcagtttgtcaaggatatccaccaattcttccttttgcttgcggatgccctgaggagtcgtagcccgtgtacggggccagtccagaccatatacagccgtaatccatgctgcacgaacttcgtgcttgggttgcgccttagccggaaggataagaaacaaaagtgaaagaatgaaaatagttcggtgcatattattcccttttagatgctaaatctctgcaaagctagcaaaaatgtctgtaaattgattattccttttttatttaatgctatttgacagaaaattactgattctcttttagtggtatctgcattcttggccgtcttttaataaggtacgaaatataaaatattaatataacaagataataaacaatgaaaaagctactatctgtgtcgctctgtcttttgtttgcggcgagtctgactgcccagacgggaaagattagagttgctactgttggaaacagtatcaccgggggaacgaatgattatggttattacgcgatgcctctggctgaaatgctcggtgatgattatgaagttaccaaatttggtaaaggctcttccggggtatttataaaattaagagaagatgcgactactcccgaaaatcctaatgaatatcaattcgcttacattaattctgagcaatgcgcagcggcacttgagtataaacctaatattgtcattattaagtttggtgcaaatgatgccaacaagaagaatttcgaaaaatatggtaaagagacttttaaagcagactataagaagttgatcgctaaattccaggctctttcgactaaaccggatatttatatttgtacgcctccgccgatgtattatggcgatgggggatttcttggttcatttgatgacaatgtagcaaagaattatattcagcctgccgtaagagagattgcggaggaacttaatctggtctgtgtagatctgtataatcccttgaagggacatccggaatttatgccgggtggcaacgattgggtgcatcccgaccatagagggcattatattatagcgaaggaagtgtataaggcgataacgggtgaattcgttatgaaccccggtgggataacagtggctgcttcggatatttctctttcgggttcgaaggcgaagatgaagaatggtgctattgaaaaagcgaagaacggtacgagattgtcattcgatgtacattttggctcgttgcctacgtatgagaaagtagaggttgacgtgcaattgaataaaaagaaatcgggatacttggatttctatctggatactgaaacaattccttttgcctcggttgatgtttcgggtgccgactctaagaatttcactacacaatctgctcttttcgaccgtcggataaaaggcaaacataaagtgactgtacaatggagaggacaggatgccaaactgaaatcagtaactatcaaggaaaaatatatgccttatgtaaccgataatgtatctcaggtctatttggtaaacaaggcaaccggtatggtactggattgtaatccggattcgaaagtgatttctgccgcaaaatatgattcggaaaagaagtcccagttgttttgtatcgagaatttgacgtatcatatcctccgtgtcagaaatatagcgaccaaccttcatgtaatgaataatggagataaagtgattgtgggtaagccgggtgatgactggcgagtgcatgatcctaaatatgcattgttcctgacacctacggatgatgaaggctattattcattggggctgtctcctgaagcaagaattggtttgtcttctgccaacagcacagaggtggtaggcaatagaagcggccaaattgaagacttggataaatggaaaatcgtgacagctgatgaaatgaagaagcagtaattcagaccttggtgtatatattggattatctatattagcattgaaaagaaaggaggttgtatctgaacctttgccggaagaacaagaaacaaaagtgaaagaatgaaaatagttcggtgcatattctttattttttgttttaaatccctgcaaagttagcaaaagtgtcggtattgttgggctgtttcgtgagattatgttacatttgcgacagttaaaaaacaacacgccatgattacatttaccctgtgcctgctggcgttgatagcaggctatttcacgtatggacgcctgatggagcgcgtctttggtccggacgaccgtaaaacaccggctcttaccaaagccgacggagtagactatattccgttgcctacttggaaaatattcatgattcaattccttaatatcgccggactgggtccgatattcggtgcgattatgggagcgaagttcggtacttcttcttatttatggattgtattgggaagtatttttgcaggcgctgttcatgattactttgccggaatgctttctttacgtcatgggggagagagtcttcccgaaatcataggccgttatctgggactgactaccaaacagataatgcgtggatttactgttcttctgatgattctcgtcggttccgtcttcgtagccggacctgccggactattggccaagctgactccggaaagtctggacgctactttttggattgtcgtggtcttcctatattatattctggctaccctgcttccggtcgataagatcatcggtaaaatatatccgttgtttgcagtagccttgctgtttatggcagtcggtatcctggtaatgctttatgtcaatcaccctgttttgcccgaactatgggacggcttgcagaataccaatccggatgccagtgaactgccgatcttcccgattatgtttgtgagtatcgcctgtggtgccatatccggtttccatgccacgcagagtcctttaatggcccgctgcatgacttcagaacgtcatggacgtccggttttctatggtgcaatgattaccgaaggcatcgttgctttgatatgggcggcagccgctacttatttcttccatgaaaatggaatggaagaaagtaatgcttccgtgatagtagacgctatcactaaagactggctgggagctatcggtggagtgctcgccattcttggagtaattgcggctcccattacttcgggagataccgctttccgttccgcccgtctgattgtggcggactttctgggactggaacaaaaaagtatgcgccgtcgtttatacatttgtattccgatgttcgcagtagctatcggtctgcttctttatagcttgcgtgacgcggacggatttaacatgatctggcgttactttgcctgggccaaccagacattggcggtgttcaccctctgggctatcacagtctaccttgtggtagccaaaaagccttattggattacgctgatccccgccttatttatgacgagtgtttgttctacttatatatgtattgctcccgaagggctgggactctcgcatatagtttcctactgcatcggtataggatgcgtagtggtagctattgcctggttctttatctggctgggaaaacaaaaaactagaaaactatcagaatgaagaaaataaaaaaatcgacaggagttgctatcgcattccttatttatgtatcagtaacggcagcctatttgttacctcgcaacacggaagtcggccagacggagaagattcttacggtggtaggttcttacgtcatcgtactcttgctttggctcgtgctccggaagaaggaacaaatgcgtgaacgccgtaaaaaagacgaacaatctattcacttaaaaaagtaaatttatgaagaaattagctttagctatttgtctgctggtggtatcaatagctgcccaggcacaatttgagaaaggaaaaatgattcttaatccttctgtaacgggattggatttttcgtatagtaaaaacgataaggcgaagtttggtattggtgcgcaagccggtacattccttgccgacggtatcgcattgatggttaatgtcggtgccgattggtcaaaacccgtagacgaatacacattaggaacaggaatgcgtttctactttaattccaccggtgtttatctgggcggaggtctcgactggaaccgcttccgttggagcggaggacatcaccagactgactggggactaggcattgaagccggatacgcttacttcctttcccgcactgtaactatcgaacctgccgtatattacaaatggcgcttcaacgacagcgacatgtcacgtttcggcgttaaggttggattcggattctacttctaacaatggataattgaaaatggataatgagctgcgctgtttactgcatagccattatccattttcaattatccattatccattaagcaagcttttctttcagaaactgccccgtatagcttgctccgcaagcggctacttcttccggtgtacctaccgctacgatatttccgcctttgtctccgccttccggtccgaggtcgattacataatcggcacatttgataacatccatattatgttcgatgatgacaatgctgtgtccccgtcggatgagtgcgtcgaaggcatccagcagtttgcggatgtcgtggaagtgcagtccggtggttggttcgtcaaagataaacagggtcgggtcggctttctcctgactcagatagaatgccagttttacacgttggttttcaccaccggatagggtagaagaggattggcctaatttgatatatcccagtccgacatcctgtagcggaagcagtctttttacaatcttcttctgaccgtgttcggtgaagaattcgacggcttggtttactgtcatttccagtacatcatagatgttcttatcctggaatttcacctccagtgtatctgctttaaaacgtttaccgtgacaggattcgcattccagcaccaagtctgccataaactgcatttctacagtgatggttccttcgcctttacattcctcgcatcgtccgccttcgctgttgaaactgaaatgtccggctgtgtatcccatttgttttgccagaggctgttccgcccatagcttccggatttcgtcataagccttgatgtaagtcaccggattggaacgggacgatttgccaatcgggttttgatcgacaaattcgatatttctcaagttacgcaggcttccactgatagaagagaactctcccgggcggtcgctgcattcatccagttcgcgttttagtgcccgatagaagatatcccgcactaacgtactcttaccggaaccggaaacacccgtgactactgtcatcacattgagagggaactttacattcactcctttcagattgttttcgcgggcacctgtcagttcgatataattgttccacggccgacgatgttcgggaacgggaatctcctcttctcccaacagataacgtaccgtatgactattgctgccttttttcaggtctttcatatcgccctgataaacgacttctcctcccaggcggccggcattcggaccgatatcgatgatgtaatcggcggcacggattatttcttcatcgtgctctaccactaccactgtgtttccgagttcctgcaattgacgcaatacgcggatcagacggtcggtgtcacggctgtgcaaaccaatactcggctcatccagaatatagagactgccgacgaggctgcttcctaatgacgttgccagattgatacgctggctttctccacccgacagtgagttgctgagccggtttaaagtcagatatcccaaccctacatctatcagaaagcggatgcggctgttgatttcaatcagaattctgcgggctacattgctgtcgtgttcgttgaggttcagatggtcgaagaactcttttagttcagtgatgggtaaatccaccagttcggaaatgctctttccgtctacccgcacatatcctgcctccggtttcaaacgtgtaccgtgacatttcggacagattgtttttccacggtagcgtgccagcattaccctgtactgtatcttatattgattctcttccagcatcttgaagaaatcgttgatgccgtggaagtattggtttccttcccaaagtgtgcgacgttgctcgtctgtcagctcatagtaaggggtgaaaatcgggaaatcgaacttatccgcattatgaatcagttcatctttccattctcccatcttctcgccacgccagcagacgatggccccttcatacacggataacgagcggttgggcactaccagatgttcgtcaatgccgatcaccttgccgaatccttcgcatacggggcaggcaccgataggagagttgaacgagaacatctgatcgttcggctcctcaaaagtgatgccgtccgcttcgaatttcgtgctgaaactatatagtttggtggtgccgtccggcagataaaaacgtagcatacacgtaccgtcaccttcatacatggcggtttcggcagagtccgtcagtcggctgatggcatctttcgtgcttgccactgccatacggtctaccagcagataaacttcgtcgcctgccaccggcttgtattcatcgatacgtttcatttcaccgttcacttccacccggttgaagccttgtttcaggtctatctccagttgttgttgcagggtacggtcttcgcgcaggcggataggggtcaatacggtatatctggttccctccggatgcgaaagcatacagttgacgatatcctccgtcgaatgcttcttgacttcttctccgctgacggggctatatgtccgtcccacccgcgcataaagcaagcgcagatattcataaatctcggtggaagttcctacggtagatctcggattacggctgttcactttctgttcgatggcgattgccggtgggattcctttaataaaatcacattcgggtttgctcattcgtcccagaaactggcgtgcgtagctgctaagactttctacataacgacgttgtccttctgcatagagagtgtcaaaagcgagcgacgatttccccgaaccggatagtccggtgatcacgacaagcttgttgcgtggaatatctacatcgatgtttttcaggttgttaacccgcgctcctttgatcgaaatatgtttgttttctgacataaaatactccttttttatgatagttggcaaagttagcgattttattggtagaagaaaggtttttgaccgggttaagatatgttataattagtaataaaaagaaatcgcttcgggataattggcgtatcttggtccagcatttacaacaaacatttcaaaataacaacaaattgacttgaatcgtgaaaaacatccggatggttattagcttattcattctgtgttttgcatctactttagcctttagtagcacaaacaaagaacaacagttggaagtcctttccgacagcatctcaaaaaaaataggtcagaaagatttcatacctttctatcaggagtatatgcgattggcaaggcagcagaacgatactgccagaatcgacgatgcttattctctgattacttcccattattatcggttgaggaatacagatagcctgaaggtggttgcatatgaatatatggactggtgtctgaaacatggtaatgttaataatcgctatacacagtggcgccagtatattcagttgcttaccgagaaggggttgcaggatgaggccatgcgtgagacagaacttcttcagaaagatgcggatgcggccaagagtgctttcggaatggcttgcagcgaaatgtgtatcggatataatcatcgggtgttcagtaacaacgtcaagctctgtctcgaatactattcttccgcactgaaacattttagcgatgcaggtttttatgaagatgcctacgtggtgtcactgaatattatccagactcatctggctagaggggagtataccaatgcgatagaatacttgaactgcatgccgggactgattgagaaaatgaagcgtaaggatatccctgtccgaccagagcttaccatgcgttattatcagtttcaagtgattgctacgttggcattgaaagggaagaaggaggcgcagccgtttattgcagaaacggataagttttatcacgaaaatataaatgcttttccccgtgaaggatggttgggatataaaattctttgtgcccggacgttgaatgacaatcagatagcactcaactatctggactcattgatggattatcatcattcggtggggagctgttatcctgccaatcacctgttgaaagcccagtttatggagcagatgggacgctttgaagatgcctgcgaggtttataaatcttatgcacatattaatgattccattcgttcggcagagctggacgagcaattaagcaaatataccgtgcagttcgaagtagacaagctagaacatgataagctggaactgcgggcggaggtcaaccgcaatctctttataacttccgtgattgtcggatgcctggtgttgatattgttgattgttatcacgttctactatatgcgttctttgtcgttgaaccggaaactggatgcggcaaataaggccgttatcaaggccagccatatgaaaagctcttttatccagcatatcacacatgaaatccgtactccgctcaattcgattatcggtttttcatccttgatggctgccggtgggctgacacaggaagagatggaagaatatgcccgtcagatggagagcagcaacgcatatctgcttgatttggtaaataatgtgattgatatagccgacatggactctcagacggatgatataccgaagaagccagtgagtgtagatgcgtgttgtcaggaatgtttaggattgattcgtcagaatctgaaagaaggaatcaagttgcaatatatgccttcttccactccggtcgaagtgtgtacggttgaaatctggatgaagcgtgtgctactcggtttgctgaacaatgccaataaattcacggaaaccggatttatacgtctgagttatgaagaagacaaaccgaatcgtctggtacgtttcattatcgaagattccggtcccggaattgaagagcactttcgggatgcgattttcgaacgctttgcaaaggcggataccttcactcagggcaccgggctgggattgtctattatccgtcagatcatggaattagtggatggaaatgtctatctggacaccagctacgcgggtggtgcaagatttgttgtcgaatggcctcaataatagttggagatagtatctgcatctattatctttgcaccacattattttatgactcaagaacattatgaatctgaaaaactatcttttcttattagttctgcttctggcggcaggagtaagagcgcaggcgccatcgggcaatgcatatcctaaacgtgagtttcgtgctgcatggatacaggctgtcaacggacagttccgtggcataccgacagagaagctgaaacagacactggtcggtcagttgaactctcttcagggagcgggtattaatgcgatcatctttcaagtgcgtcccgaagcggatgcattgtatgcttcacaacacgaaccgtggagtcgtttcctgacaggaacacaagggcaaatgccttccccgatgtgggacccgatgcaattcatgatcgaagaatgccataaacggaatatggaattccatgcatggatcaatccctaccgtgtgaagacttcattgaagaatcaattggcaccgacacatatttatcatgaacatccggaatggtttgtcacttatggtgatcagatctattttgatccggcacttcccgaaagccgtgagcatatctgcaagattgtttccgatattgtatcccgttacgatgtagatgctattcacatggacgattatttctatccttatccgatcaagggagtcgatttcccggacaatgcgagctttgcccgttacggaggcggtttcagcaataaggcggactggcgtcgtggcaacgtaaatatcctgatcaagaaacttcatgaaacgatacggggcatcaaaccgtgggtgaagttcggtatcagcccgttcggtatttaccgcaatcagaaaacagatccgttgggcagcaacacaaatggtttgcagaactatgatgatctttatgccgacgtattgctttgggcacgtgaaggatggattgattataacattcctcagatttattgggagataggacacaaggcagccgattacgaaacactggttgactggtgggcgaagcatacggaaaaccgtccgttgtttatcggtcaggcagtcatgaataccattcagcatgccgatccgaagaacccttctatcaaccagcttccacgaaagatggctttgcagcgttcttatcagactatcggcggaagttgccagtggtatgcggcagccgtagtcgagaacgctggaaaatatcgggatgccttggtacaggagtatcataaatatccggctttaattccggtattcgactttatggatgataaagctccgggcaaagtacgtaagatgaaaaaggtatggacagaagatggctatatacttttctggactgctccgaaagcggagactgaaatggacaaagctattcagtacgtagtataccgtttcggtcccaaagaaaaggtgaatcttgatgatccgtcacatatcgtagctatcacccgaaatcctttctacaaactgccgtatgaaacgggtaagaccaaataccgctatgtggtgacggctttagaccgtattcataatgagtcaaaatcggtaagtaagaaggtcaagctgtaaggactgcatgttcacctaccacctccccctgcgggtactcctccttctcgaaggaggagattttaagatactactgactttttagttagcctcttattactttattttaataaagcagtagtcctgcaatcccgcaggcgataatcattaatatcggatttgccttgtattttctggtgccgataaaggctatcaggaagataatgatgctgatgacaaatgtgtaggtgtcttctgtaggtgagccgaagttttccacattcatcaataccagtgcggcggaagctaataatccgacaactgccggacgcaatcctgcaaaaatagattccactaccggatgtttctgatatttcagaaagaatttgctgattgtcagcatcagtatgaaagaggggaaaacaacagcgaatgtggcaacaatcgatccccatacacttcctgtggacgtaaaaccgacataagtagccgcattgataccgataggccccggagtcatctgactgatggcaacaatgtctgtgaattcttgcgaagtcacccacccataacgggttactacttcaccttgtatcatcgaaagcatggcgtaacctccgccaaaaccgaaaagtccgattttaaagaacgtataaaataactgaagataaatcatctctttttaatttagaattatgaatcttgaatcatagccttgggtgttcactctccacttttttaaattttccccataggaaacctcctacaccggcagcaatgataatccatatcggggagaagcccaatagccagatcaataatgccgatacgacggggatccataagttgtaccggttgattttggccgaccgtcccatggtgaaagtcggtgcggcgatcaatgccaccacggcgggtcgtattcctttaaatatgcgttccacaatcggattgtccttgaaagaatggaaaaagagcgcgatggccagaatgataataaatgaggggagtatagtccccagtgctgtgacaatacttccccgaatgccacgcagcttatatcctataaagatagagatattcactgccagaatacccggagcggactgagagatagccagcaggtcgataaagtcttcctgtgcgatccattttcgtttggttacgatttcattctcaataagtggaaccattgcatagcctccgccaatggtgaaagcgcctattttaaaaaagattccaaatgattcgaggtaaatgttcattcttctttttctcctccttccttatcggacttgttttcttttccagccttgccctccttgtggggcttgccttcttttccatattggctggggcttacgttgaagtgcttcttgaatacttcacggaagtacttcgcatcactaaatcctgtcatttctgctatttctgttatactgtgtgtaccttctttcagcaacttcaccgaacgtttcaggcggatcaggcggatgtaatcgcccggagcctgatcggtcaatgccctgagtttgttgtagaagctggtacggctcattcccatcagattgcaaagcacatctactgtaagagccggattgtctatattatcttctatattcttccgtacattggcgataaacttccagtcgatatcctgcgagcagttgatgcattcgtcttcatgatcatcctcatcgtccatatccagactcccgtatttgcttcgcaaaagggcgcggttgatcaacagattggagacggtagcttttaatattccaatattaaatggcttgacaatatactcgtcagcaccaatctgaaggccggacaatatgtctttttcattattaagagctgttagcaggataacaggaatatgcgacgtctcgatattatttttgatggcgtcacacaattcatcccctctcatttccggcatcataatgtccgagataaccagttccggtttgtattccggaatgatggtcagtgcttctttgccgttgcagcagttctgtaccgtatattcttctgccagtgtctgtgacagatagttgcgcagttcatcattatcttctacgattaggattcgctgatgattcggattctgttccttatgcacattctcatagatgctggcaggcacattggttgtacttgttatctcttgccggcgtttgcttggtgtggcaaggtgtgctttatggaagcgtttgctgtcttttgggaaagatatcttaatcaccgatccctgattctccacgctcgacaggttgattttgcccttgtgtaaccggacaagtttccataccagcatcaaaccgataccgcttcccgtcactttcgaattgatggcattgctgccacggaaatgaagcttgaacagtttcttttgctcgctggctggaataccgattccggtatccttcacttccacgctccacgaatcattgttctctgatacgaaaatctgcacattaccattttccggcgtgtattttaatgcgttcgatattatattcttcagaatagattccatcttttccttgtcaaaccatacattcatataccggaaattgctttcgtacgtaaagttgatatgcttgatattggcataaggctgaaatgcattgaatatttctgtcatgaacgtgtttagctcatgctccgaaatgtataattccgaagaataaacatctgctctctcaaagttgataagattcgttgtcagacgcaacaaggcatttacattgcgtatggcagtgttcatgttggctatgccttccttgctcagagcttctttttcgcgcaaatcttccagaggagctttaatcaatgtcaacggggtgcgtatatcgtgtgccgtattgatgaagaagtgtattttttcatcggaaaccttccgctgttttttcagaataagaacccgcaggatgataacagcaatgagggaaatcaggattgcatacaatatcattgcccagggagtgagccagaaaggttgggcaatgataatatcaatgcttctttcttcaagcatcacccgttggtcttcgttggagatggcacgcacacgcaatacatattttcccggagcgaggttggtataacggattgtactttcattgccgggtttgctccactcttcgtaaaatccttccagcttccatgaataaagaacattggaaggataatcatagttgatggaagaaaccatcagtgaaaagatattctgattatattttagtcttaattctttggtttcgttgatatctttttccagtggtgaattcttgtctcccggatataccgtctgataaaacagtttgaaatcactgaagatcatcttggaagagtacgtcctggggagcttcatgtctttattgaactctatggcaccgtccgagctaccgaagataaaattgttatttctgcgcagggtaccggacaacgcattgaagtgcgtagtcatcagtcccatttcctttgtccagttgtagaaggttttttgtttgggatagaagctggtgagtccgttctccgtacttaatagaatttcattgtcttcatccgataatatcgtgtagatattgttggatatcatggcacagtttcctgtataataatgggtaaacaactttgtctggggatcataaatcagtactcccgatccgctggtacctatatacagtgagccttgtttggtctgatacagggagtagacataggtagattctaccggcagttggatgcgttcatatttcccggattctatatccagaagaaacaggcctgttgccgtacctatccacatacttttgtcatccttttcgatgatggcggtaacggaatgcagtccgtggtagagccgtatgtctttggtttgtacgttgattcgcttcaggttataatatcctccgctccatacataaccgcgtgagtctttgcgtatgtcacgtatgtatttatccggacgtatactttcatgagcatacgaagcgggtgtaaaataagttgttttcgacgtgcgtttatctatctgataaagtcccgagaaatatccgcctgcccaaataatgccgggagatacttcacataaggttgtaaatatatgatttttgctgttctgtacattctcaaaggtgctcagaaacgagcgccattttccggtttttgagtcttgcaggctaattccgttgttggtgccataccataagtctccctcgctgtcttctatgatagagttcacctggtcgttaatcagcgactgcttattaccgacagaatgtttgatccatttataactcggataacgattgttctgaatggtaattcctatcggatagtttgccatccatatccgttcttcgtcgtctatgtagatgtcgttaatgctgttgccgttcatgccattgtagctgttgtagtctgctacgataaaaggtacggtctggtacgtatcgacattcatcttatagatacctccgccatcggtagcaatcagcagttctttggcattcagtggtttgatgcgtgatatacttacgtctttcaggctgacttccggttgtgtgatggtttttgtgttcatgtcgtaaaccatgacgccccgttcgaaggcaccgatgaacagtttgcggattttggggtcgaagtgtaaatcgttaacttgaatattgacgttgtctagcttgtcgcaggggagaagttgcagtgtgttgtttttcagttgggcatgatgaatacccatctccgtcccgataaaatagtgggattcgtcgatttgttcgatgtcgtttatagcttcgctgaggcagtttttaacatgagtaacctcttccgtccgggtgttgtaaaggaagatcgtttcttcgttgcacagccagatatgattgttatgatcgatccagctgaaagtaatgggagccggtaaatccttaaagtcttctatcggcaacttgtagacgagttcgaaagtgtcatgaatacggtcataccggaaaatcttgcctttcttaccgatttcccatagcgttccttccggatcgatatataaccaattcagatttaacagcgagttgagttctttgtcgccgtccattaatttataccgtttaaactctttgccgttgtaccggtcgattccctcgtgcgtaaggaaccacatatatccaacattgtctttttgaatgtagtacactctccggttgcttaacccgtcttccactcctagatactgataggtctgggcgacacaggtcagaggaaacaataataataaaaaaagccattttttcatacaaataggacttttatgggttattgaatctttagtgagggggaaagtttgacaaaattaagaagatttttcgacactacaaaattttaggttaagataacggtgctctcaaagtgaagtatacaggagctttcgcagctatttgtatatcctgtttatttagggaaattaagttgtaatatgcagactttgggtatggaaaaggagttaaaacaagaggctgttactttataacaaataacagcctccgtttcaatgatagaaagatatcttatttagtcttctcttctacccatttgcgggcgttgacaaatgcttctatccatggagtaatctgatcgctgttcttacggtcagcaggatagcagccattctgccacgggaagatagcacgttcgaggtgaggcatcattgccagatggcggccgtcggcgctggcaagacctgcgatagaataatcggaaccgttcgggttgccggggtattcatcgtagctgtattttgccactacgttgtattggtcttcatcgtaaggcagagagaatttaccttctccgtgagccacccagatacccagtttgctgccgctcaatgagccgaacattacactgcggttggtcgggattgtcaagcctacataagtcgattcgaatttatgtgagtcgttgtgcagcatcttgcctttcttttcgtgttccggattgataagtcccagttccatcatcagctggcaaccgttgcagatacccagtgaaagcgtatcttcacgtgcgtagaacttgtcaagtgcctctttggctttagggttgaacaagaaacctcctgcccatcctttggccgaaccgagtacgtcggagttggagaatccaccgcagtaaacaatcatgtttacatcttccagtgtttcgcgtccgctgatcaggtcggtcatcgtcacgtctttcacgtcgaagccggcaagatagagtgagtaagccatttcgcgttcgccgttcgttcctttctcgcggatgatggcagcgcggacaccgctcggagtacgacggtccggagtgataccatactgagagagtttacctttgaatccgggcatgaaagcgaattcaaccggttgcatcttgtagttttcgaaacgtttctttgcgcagccgttcatagactgtttgcggtcgagcaggtaagaagaagaataccatacgtcacgcatgtagtcaacaccgaactgataagtagcgtcgcccttcgataccaggatatgacgttcgtcggtcggtttacccagtttcacgaatcctacgcctgcatcttccagaatctttttcacttcttctttatgcttgtcgctgatctggatcacgatacccggattttctgcaaacagaatcttgatgatatcttgttccttcatcttgtcgaggctgatttccataccgccttcaacgttggcgaagcacatttccagtaatgtagtgatcagaccacctgctgaaatatcgtgtcctgccaggatcagtcccttgttcaccagttcctgtacggcaaggaaagcatcgcggaagtattcggcatcctgtacgcagggtacgtcgtcgccaactttacccagagactgtgcaaaagcggaacctccgagtttcagttcgtcgaagctgaaatcgatatgatagagtgttgtcttttcgttgttcaccaataccggagatacgactttcttcacgtcggatacttcgccgccggcagatacgatcactgttcccggagaaatcactttctcgccgttcggatatttctgtgtcatggacaaagagtcttttccggtaggaacattgatttgcagagcgcagcagaagtcgctcaatgctttcacggcagtgtaaagacgggcgtcttcaccttcctgtgagcggcacggccacatccagttggcagacagggaaatgctgtccatgccttctgccatcggagcccagacaaggtttgtcagtgcttcggataccgaaaggatagagccggcagccggatcagccagtgcggcttgcggagcgtgaccgatagaagtggcgatacctttttcaccacgatagtcaagtgctacgacaccacagtcgctcaacggcaactgaagttcgccctggcattgctggcgggctactttacccgttacggagcggtctaccttatttgtcagccagtccttacaagctacggcttcgagttgcagcacattggtcaggtattcatgtaatttcggcaattcgtattccggcatttcataatgacgttctacggtcttgtcgatcatataagtcttcggagatgaaccgaacatctgctcaacggccaggtcgaacggacgtacaccgtctgcctgctggaaagagaagcggtgatcgccggttgtttcacctactacgtacatcggagcgcgttcgcgttcggcaatcttacgtacatgctcgatggcttcttctttgatcagaagtcccatacgttcctgactttcgttggcgatgatttctttagcggacaatgtcttgtcgccgatcggaagtttgctcatgtcgatcagaccgccacattcttccaccaattccgacagacagtttacgtgacctgccgaaccgtggtcgtggatagaaacgaccggattcacatcttcctcgcagagtgcgcgtactacgttgttggcacgtttctgcatttcggcgttggcacgttgtacggcattcagttcaataccgctgctgtaacgaccggtatctacagaagatacggaaccgccacccagtccgatacggtaattgtcgccaccgatgacgactactttgtttcctgcttccggagtacctttgaggcagtcgcgttgtgtgccgtagcctacaccgcccgcaagcatgataactttgtcgtagccataaacttcgttgttttccgtgtgttcgaaagtcagtaccgagccgcagatcagcggttggccgaacttgttaccgaagtcggaagcaccgttggatgccttgatcagaatctgttccggagtctggtacagccatttgcgtaccggaagaatatcttcccattcgcggccttcgtccgtgcggggataagaagtcatgtagacagcagtacctgcgatcggccatgagcccttgccaccacccatacggtcgcggatttcaccgcctgtaccggtagatgcgccgttgaacggttctacagtcgtcgggaagttatgagtttctgctttcagtgagatgacgcttttgatgtctttcacctggaagaagtcaggttttgagtgatctgccggagcaaactgttcaactaccggaccttcggcgaaggctacgttgtctttataagcagagatgattttattcggattctcctgtgtggtctttttgatcatctggaacagagacgattcctgttctacaccgtcgatgatgaatgttccaccgaatattttgtggcgacagtgttcggagttgatctgtgcgaaaccgaaaacttcggagtcagtcaacttgcgtcccagatcgttttctacctttttcagatagtccatttcttctttcgagagtgcgaggccttctttctcgttgtaggcttcgaggtcttcgatggatacgataggttccggttggcggttggtggtgaatacgttttggtcgagtcctttgtacatgcgttgcagcatcgggtcgtagtcggcattttcatcttttaccggaaaatattcctcgatgcggagaatgtcttcaagtcccatgttttgggtgatttctactgcgtttgtactccaaggggtaatcatttcgcggcgtgggccgacgaaacagcctttcaggttttcttcactttccgtcacggcttctccaaaaagccagcagagtttattactttcgtccggggtgagctgatggttgctctctacggcaatcacgctcttggaaggggttctgaaaaaaagaatcatgtttattttttgattttacgatttttctgtggcgcaaagataagcaattttggtgtatatagtgactcttgtgtggaaaaaacgttaatatcctatcctcttctcataaaaaagtgcgatatttgcggcatgattcagattgaaacaatattcgatataatagtgaaaggctttattataggcgttgttgtgtccgcacctctcggaccggtgggggttctctgcattcagaggacgctgaataaagggcgctggtatggatttgtgacagggcttggagcctcattaagcgacatagcttatgctctgttgacaggttatggtatgagctttgtgttcgattatatcaataagaatattttttatctgcagttgctgggcagcatcatgctgctgcttttcggaatctatacctttcgcagcaatccggtacaatccatccgtccggcatcgtccaacaaaggttcttactttcacaatttcattaccgcattctttgtcacgctctccaatcccctgattatattcctgtttatcggactatttgcccgttttgcctttgtgcagcccggtgtcgtggtgttcgaagaaattacgggatatcttgccattgcttcgggggcgctggtgtggtggctcggaatcacttattttgtgaataaagtgcgcactaagtttaacttacggggcatctggatactgaaccgtgtgattggcagcattgtgatgctggtgtcagtggcgggattaatctatacgttgctgggagagtcactttattaagaagaaaacttatgaatcagatagccagacagcttaaagagaaaaacattgccgagtaccttatatatatgtggcaagaagaagacctgatccgcgccaatcatggcgaactggaggagatcgaggcgaatgtgatcgcccgttatccggaagatcagcgtcctgccctgcgagagtggtacggcaacctgatcactatgatgaatgaggagggggtacgtgaaaaaggtcatttgcagattaacaggaacatcatcatcaaactgacagaacttcataatgcgttgacttcttctcccaaatttcctttctacagtgccgcttatttcaaagcgttgccgtttattgtagaattgcggaataagaatggcaaaaaagaagaaccggaactggagacttgtttcgaagcactctatggattgttcctgcttcgcttgcagaaaaagcctgtcagcgaggggactatgaaggcggtagaagctatcagcagctttctttccatgttggcaaactattacgataaagacctgaaaggggaattaaaacttgatgaataaatgagaattttagtgacgggtgccaatggtcagcttggcaatgaaatgcaagttcttgcaaaagagaatccgcaacatacgtattatttcacagatgtgcaggagctggacatctgtaataaggacgctgtttgggcatatattgctgaaaagcggattgagcttattgttaattgtgcggcatatacagcagtagataaagcggaagatgattcggaactggcttacaagctgaacagtgaagctcctaaaacgctggcatgtgcagcgcagtttaatggtgcggcgatgattcaggtgtctaccgactatgtttttgacggcaccgctcatattccttatacagaagaatgcgatccatgtccgaattcggtatatggaacaacgaaacttgaaggagaatatgaggtactgaatcattgcgaaaagtcagtcgttatccgtaccgcatggctttattccacttttggcaacaacttcgtgaagacgatgatccgtctgggcaaagagcgtgatagtctgggagtcattttcgatcaggtaggaactcctacttacgccaatgacctggcacaggccatctttgctattattaataaaggcatcgttcgtggagtctatcatttcagcaacgaaggagtctgctcctggtatgactttacggtagctattcatcgtttggcaggaatcacttcatgcaaagtgaaaccgctgcatacggcggaatatcctacaagagcgaaccgccctgcatattccgtactcgataaaacaaaaataaaaacaacgttcggcatcgaaatacctcattgggaggaaagcctgaaaagatgcatcgatactttataataaatatggcagataatacagaaatacagagacggcgaacattcgccattattgcgcatccggatgccggtaagacatcattgacggagaagttattgcttttcggtggtcagattcaggtggcaggtgcggtcaagagcaataaaatcaagaaaacggctacttccgactggatggagattgagaaacagcgtggtatctcggtgacaacttccgtaatggaatttgactatcgggactacaagatcaatattcttgatactccgggtcaccaggactttgccgaagacacataccgtacgctgactgctgtagacagcgttatcattgtagtagacggagcgaaaggtgtggaaacacaaacccgtaaactgatggaagtgtgccgtatgagaaaaactccggtcatcattttcgttaataaaatggaccgtgaaggtaaggacccgtttgacttgctggacgagctggaagaagaactgatgattcaggtccgcccgctgtcatggcctatcgaacagggagcccgcttcaaaggagtatataatatttatgagaagaaactggacttgtaccaaccttccaaacaagtggtgacggagaaggtagaagtcgacatacatacggaagaactggataagcagatcggtaagccgctggcagacaaactgcgtggcgatctggaactgatcgaaggagtttatccggaactggatgtggaatcttatctggcaggagattgcgcacctgtattctttggctctgccttgaataattttggtgtacaggaattgttgaactgctttgtggagattgctcctagtcctcgtcctgtacaggcagaagagcgtgaagtgaaaccggacgaaccgaaattcaccggattcatctttaagattaccgccaatatcgacccgaatcatcgttcgtgtgtagcattctgcaagatatgttcgggcaaatttgtacgtaatgcaccctatcagcacgtccgtcatggcaagaccatgcgtttctcatcgcccacccagtttatggcacagcggaaaacgaccattgacgaagcctatgcaggagatatcatcggtttgccggacaacggaactttcaagatcggtgatacgctgacggaaggagaactgctccatttccgcggtttgcccagcttctcgccggagatgttcaagtatatcgaaaatgccgatccgatgaagcagaaacagctggcaaagggtatcgaccagttgatggacgaaggtgtggcacagttgtttgtcaatcagttcaacggccgcaagattattggtacggtcggacagttgcagtttgaggttatccagtatcgtctgctgaacgagtataatgcttcttgccgttgggaaccggtaagtttgtacaaggcttgttgggtagaaagcgatgatcctgctgagctggaagctttcaagaaacgtaaataccaatatatggcgaaagacagggaaggacgtgacgtattccttgccgattcaggttatgtgcttcagatggcacaaatggacttcaagcacattaaattccacttcacaagtgaattttagtctgcttggtggaatttaacaaaaataattggtaaaaggggaagaattatgttacctgtaaataagggaaggagaaatgaatacaacattttgggagaaaatccagcagggggatgaagaagcattccggcaactctacaatgaatattcggatttactttacggatatgggatgaagattgccggtgatgatgatctggtaactgaatccattcagtctttgttcgtttatctgtatgagaagaggcagagttgttccgagcctcagtccatatccgcttacctgtgtgtggcgctgaaacgcatgctgctgaatgagttgaagaaaactgctaatggcgtattcacatcattggacgaagttaactcaagcgaatatagattcgatttggagatagacatagaaacagcgattgtccgttccgaacttgaaagagagcagttagaagttctgcagaaagaaataaatggcttgacaaatacaatcgccaaatcaaaaaattcccgaccgaaaaacaaaatgtgtcattaaaacacatattaacataaaacaaaatgtgatttttggtgcaaaattaaagcctgtttaatcatcgtttaaacaggctttaattttaatctatgatcatgtaaactgataaatcaggattggcaacaagcggaagaacatcctcatcatcaagaacgctcattgcatatctatgaatacttttctttatcatttccaacgttggtttttcaaggaatatggaactggcaaatgtcaccagttcgtttccttcgttatcggttctgtcaatggattgtattgcatatcgtattatccatgttccatcggataattgttcgatcggcttagccaatttccggggtaagatattttttcgcattgccttttcttatttgtttttttaattgtttcttaaaattatattcgttcttcaacacaaaaacctcccaatgtccctgaacataaaaatattcccaccatgcaggattaatacgtttcgccactttccgtcttagattgtacgtattgaaatgcctcattaatccatagtaggaattcagggtggcaacaaatttgtccgcgtgtgcttccgcaaagccttcctccgctattttattatatttgctgattacatcgtataaattaccgacaacacggtttgaaatataaattcgaccgggcaaaatgaatgcccctacaaacaaaactcccttagaatgatgctgtatatatatttttttaggatgtaatttaagaagcagctgctctttcaggtaactgtcaagcaaaggaacagtatttagaatatcttctttattacgcattacaaaggcgaaatcatccacaaaacgcacataatgcttgattcccagtatttcggaaacatagtaatcaaaacaagaaccgataaaatttgcgaatttctgcgcatgaagactgccgggggcaaaaccatgatccggatcagcatgaaacaaacttttatcatgaggcaactcatcccataaatgtaacggtgatttcctataacatttatactgtggctggtgaaagataacagtgcgcaatatatataataaacactctatatcgtcgcctttatagttatcccggataaacaggtcgatcatttcccataacagggatttggacattgacataaaaaagcttttgaaatcacccttgaaaatgtatgcgtctttcgtataattttcactgacttccatgatcatcccattcagatagataacagccgaaagtgctccttcaccaatacggcaattttttgaaacatttccctgtgcctgaaaacgctcttccaaaataggatcaaggcgtagatcagcccaatgttgtattacacgatcaacataagcggaagcaaaaatttcacgaagaacgggctttttccgtatgaagcattttgaataatcaggttcgtagcgaccgtatctgatagcatcccacacggcaaccaaatccgtgtcatattcaaacgaaaactctatgcagtcatctgtattgcgtttattcttgcaacagacgtcaaatgcatgcacgatggaagataagggtatgtcatagatcggtttatctgttgcggaaacgggacgaaccctgcctgcgttagtcttgttgttcgtgttcacgttgccgttgttcatgttcacgtaccacgcgttcgaggattcagcattcactgtcttagtctttcccggttcatcaccgggggaatgcccaatagataaattagattgctctcccataaactccgtgaagattatggctctggctttacggaagctgtcttttcctgggaagcggtgaaattacgccaccctataatttgcttttcaatcgacgtaatcatctcaatgatgtctgctgtcgtctgaatattgatcagtttccggtctcgacatacccttaataagagtttcaatgtatcaaacttaacaaggaattcgttcaggtattccactcgacgcggaaggcttgaatttgcataacggatcaactcgcaacaacgaagggcggacatcataagttccgtaccgaattcgtacctgtaattcttcggaaacttgtctcttgcatcaagtatcaacattaataaccgatacattaattgatagactggtctgtcctctgcttttcccatgttaatttttgatatttttaaaatttttcttttgctccgcaaagttaatgattgtcaaactattaacactcattttttcagaattttaaaacttaaaaagcccctaccggggctaattaaacgtaactatctaagagataaagagttaaagagataaagaatctattgcggaaacgggacgaaccctgcctgcgtaagtcttgctgtgcgcgtacacgttgccgccgttcatgctcacgcaccacgcgtccgaggggtcgtattcggtgctgctccaataccagtcggctgtaattatattttgattacctgatacagaggataataactcattgatttcggtcttatatttggcgatggtaatgagttctccttcgctgggaagataccactcggttttgtcttcaagtccgtccagttcaagcgtacaagccttatagttctttgctgcttctgcggctggtgcaccgacgacaccggaattatccttgactcctgcagtggcttctatgatagcatcagtattttgctttccgtctgccgtttcataaagcccttgattaccgttcccgtaattcttaacgccacggatgtccgtaccgtatgccccccatttgaaagtacgcccgcctatatcgtcagtgcagtcgcttttcgctatgacgaactggcgacgatccgcacggatacggacacctacacgcaggtattttgaacggttatttgcgctaagggaattccattcttcagcagtaaagaacacgttgacaccgtcttcgatccggattgtggcaaaggacaggtcaagcagcccgccagcccatctgatatattttgcaatgtcactggcaggcgtattttcgttcacgttggtaaaaccgatctcctgcaaaacagatacctgttcttctttattcatgcgcaaaagcaatgcgctttcattattcttgtctgtcataaatatgcactgttttaatggattactcttctgccgttgcccttacatgcaacaggcttgtatttttattctgtacgttcatgtgcccggtattcaaattgcacgtccatgcatttgtcgtatcatagtacgtgctcgtccagtagtatttgtccgtcaggaacatgctgtcactgctccaaaatgcacgcagcatttcattgatttggtcacggtatcgatacatgatcatcatctgtccggaagaaggcaagaaccattcagtatcatcctccagaccgtcgccatcgagtgtgaaggctttataggctacggcagcttccgcagcgggtgcgccttccacaccgttcgaatttgtccctttcagggcatcaaggatcaggcgtgtatcttctttcccggtgaagcaggtgtacattttgcccagcatctttgcggaaagcccgtcaatcgctttaccaagaccgccccaatagaagctggaagacaagtcagctgcataacactcttgtgccgcaatgacaaaagactgcgaatgtgcccggatacacaaaccacgacggataaacttcaacttgttggcaggagtcaacgagttccactcctcacgggtaaaataccatttggaattatcggaaatccggttacatgccacccgcatgtccagcaacccggtagcccactttatccggttagggaactcgctggcacgcgagttttccgtaatgtcggcaaagcctaccgcctgcaaggcttttacctgttcctgtttattgagacgcagcagggttgcgctctgttcttttgtactcatgttatttgctgtttactatatcgttaatatccatattttcttccgcaaaccgttgaaggtattcttcataggtttcaccattataatagtccatgatttcacccacattatccaatgtgacttcgggataatagggttctccgccatacgcttccgcattaaaccagtcgatgatcttgatataagcgtcgattatggtgctgacggtcagaccttcgaagccgttccggatcgcttctatatccgagttctcgatgacttcatccagcagatagttcccggtaagtacgggcttctctacctgattaccgttttcatccagtcccccgataccgagttgcaggatttccagcacttccgaaccgttcccgatgaaatcacggtttgtgatacggatatggcggaatacgacattaccttcctgcgaatcgattatgtcgcggatcatctttacaacgtcgataagcgggcagttttccacgcgcagtgtggtgatgttcggcatggattcaacaacgatgcctgtgtccgcgttcagccccttatagctcaacttatcgaggttcatcaacttgaactgtgtcatggtggtcggcagttccgcatattgaaccggacagccgcctacaaaattgataatctgcagggaactgccgtatgccaacaggcgcaaaaggcgtgttgccccggtcaggtcaagagataccagctttttgaagttctcaacgttcaggagtctcatgtacggtttttcaccaagcgggaggtctgtgacgctattgttggcatatccttcgcgtttgctgccgaacaccagttcctcgacacggatcaacgtagtgaagtcttttgcctgtgtaccgtcgatgttgacagtgctcaaatcacccaaagacttgatcttcgatgcaccgatgatatagatcgcgctcgatgagtttgaaccgtcgaaatggaatgtcacctttgagccgtcttcttccgcccatgccccctgttgtgcggctggcgtattgaagcccgcccacaatttccattgctcgcttgcggtcacttcgatattgatgtcctcaccgatggcgcggaacatgcacatattatccgccttcaggatcgtgctgacaccgaaataagcgtcaaggaagtcataacgggcagacacatagtaatggcggtaagggatacccataccggagatcacgttgaacgcctgaccgcccggattggtgatatacttcgccacggaatcacggcaagcgacgatcgcagggatcaagaggtggtctttttcttccgattcacgcagaacggcttcgtaggagaaagcggactcgccacccggaaggcgcgatgtgcggattttctccgcggtcgctgcaagtccgacctgatcataacgccacatgccttgccaaacgacgctcatacgtccggcaaatacgttttccccctccatgacgctgtcaagcatcacgttatacggaagtttgaagataccggaattattctttccgttcgtactgtccgaatcataatcgtggttcatgtaccaacggtaaataccgtccgggcagaggtacaaagcccacatgctgtttttcgataactggtcgacgcctgaatgatacaggatacggactaggtatgcgcggaaagaagccacgctgcaatacttgtccatttcctcaaccagcttccggtatcggttttcgagcgtatcgctgacctgtgcaccgttgatactgattttgccgcctgccatacggttcttcgggttacatgaatacacccattcgcagaactgtttccagtggtacggtgtcttctttccaagcgcataggcaaggttcatgccgtcatcgtccggtgtacggaattcaaagaacatcgtccatttgggaacaaggctttccgttgacagttccgcaccgtacaagcctttcacccacttgctgtgcgtcgactgcatagtcatgaagttgtcgatatcatcgaagatgcacataccttcataatcaagcatttcaacacattcaaccggattcaggacacgtccggtaacgaccgttttcctgccgttgaaagagattgttccggtagtgtttttccatgccccgtcgacgtattccatgaacttgtacgaagcgtccgtcgatttggaaagcatgtagatcgtatcctgatcgtagtcgtcagcatgggacatgaaataggattccgtcacgtccggaaggtcggtgaagtcgccataactcaaacagtcggcattgtagccgggaacatccttgaagccgaaagtcggtggatttcccttgtcaatgttccagtcaccgcgacaccaaaagtacgcgtcattgatatttccggtatctgatttgaagacaagcacactgttaccgtcaatacttgtacgcaagtccagcgtgttgttttcatccgcatagtacgcgttctgcgctggggtcatatattcctcgcccaaagccttctgcatatcgttattgatacgggaaatcggggtgtttaccttgtcgggtgatgcatagttgaccttcaggcaaaccttgtcgaatggaatagtctcaccacgcaaaatgattttcttgtttacaatcgcgtcgagcaaagcctgcggagcccgttccggatacatcgcacggataattgcctttttcagcttgtatttcctgttcttataggttggatagaaggcggatgtcgtaccctgattggtcgtttccacgttctcgaaaataagactcatacctttgtccttgcagaacagatacaggtctgtatatatcttggtggacgtgtccgttacgttgtcaagcgtttcaagtttatagtccccgtgtggcatttcgaccagacagtcgcacatttcaagtgctttgttcaggtcgattttattgtcggttaggatatcgttctttttgttcaaagcgatcatttcgtccgtatcagatttaccgatcacaaattcatcgttaatctgttcgtccgccatttccttttcccaggagagcaagcggtacatatacagttccccggctgttccggagaagctgatttgttcggactgtttgatcgcgctttgtcctgccgtatatttggatgcgccaatcaggtcaccgtcacaatatagcttggtatagcctttgccgtcctcttccgcatttgccttttcaatgacgaaagcaaactcgtagatgtcgcccggcttgaaataccgttcgatcagttcagttccgagtgctttgaagtacacacattttgaagtgatacgccacccgatttggtttgcttcgtcccagcatgacacgacgttcgcgtcaggatcggcagcgttctgcgtctttatcttgatgatggtagtcgatccggtctgctcaatgttggtacggttatagggacgataagtacacaatgcggtggcatcatccgaaaccttgaacgccttcccttcgttcttgtcggtgacaaaggcattcgtggaatagttgaacccgttctgcttcatttcataaagtccgtacagccatgacttgtcctgatccgaattgtccttgtctgccggattgaaataaatcatatagctggaatcaccattgatgtcaatgacggaactgttaacggagtactcaatcgtattgctttccccagcaccgcatttcccgtaaatacccaacgtattcctgatattgtccgcaatagtaaagccatcgacacgggtggacagattgaatgtactgttacgtcctactgatacggtagtcagcactgtatcggtttcactgttgtctccggtagaggtattggcaactttcacgaccttgtgtatttcgacatgggcatcggtagcgacatggctgggatcatagcacgccacttcgatgttcaggtttgcatacttcttgactgaccatgccgtttccgtttcttcggaatgcgcaagcgccacgataggcataagacttgacgggttgacaatcatcacatcaaagaactggtagttcgaccatacgcccgattccacgtcctgtgcgacaatcctgacagtatatgcaccatgtttcagtcccaaagacgaaacgttgatttgcaagtcctgtgagcgtgtggaagccacgctggtttgtgagatcagcttccattcgtcgcctattttgatatgtgccgtaacggttgacttattggcggaagacagtttgaacacgtccgtcatggtgatgagtcccgaaccttcctgcaatgttttgtacaaagcccatacacgggaaagtttcaggtttacagccgtgacgctgattgtcttctgcgcggtatttcccccgtcatcggtggcaacgaccacaaacttgcggttcatcgcttcgctgaaatagcttttaacggaaatcgcaaaagtgtagtccgtatctgacggggaactttcccggttcacgttgaacgtttcaagcgtttcccccgttgacttgtctttcagttgcagggtttcgatattgttgtatgaaaccatttcacccgatccggtacgtgacaggatcgcaagcctgattgtcaggtcgtcagttccgagtgcggcatacagggaggtcttttgcggatagatatacacgattgtcccggcaacgcccccaccgccaccagttccgactgcaaaggtgaaaccgtcgcccagcggaaacccttccgcgtccttcatgtacacacgcaccgttccgtcttccgcctgttcgccatccacgtcgacgggcatggcatcatagaccgcaccacctgctaccgggttcacgctgtccttgatgatttcggaatcggtttcgactgttcccccagcggcagaaccgaagtcgttccatgccgccaagtcattataatcggcacgggacgcgcacaactgtttggactcgaatgtttcctttccggtgcggtagatgataaccacaccgggtttgatgcattccgtttcatttgccgtctcgtaagctgtcagggcatcgatagccgtttgaagaatatagtatccgtttgataatggcgcaatttcatcgaccagcagcactgcgcctttgcccgtcatgtcgccaccagcaccaccgaagtccgtccagttcgcttctgtggcaaagccttcaagggatgatccggcaaactgtttggattcccattcaccttcagcaattttataagtcaatacgatacccggtttgcggtaagtgacattatccgcattctccctttccgtaattgcggcaatggctgcggacaaggaatagacagagccgccacatatttcgttgacattgataacggacagggctttgttagccagcgacaatgctgaagacgcggtagcctgtgcgtcttcagccgatttctttgccgcttttgcagccaagtccgcagacgcggctaactgtatcgcgtcggagtcggcagaaagcaaagccccggcaaagtagatgtaggtcttgttgccgaacaggtatattttattctcgtgcgggtgtgtgcggtcggtattcatataggcatcaacacctttccagcttggataatacttgttgtcaacgaagcaggcaaatttacccagactggcgagaaatacaattttaccgtcttcagtaggcgcattggactgctccaacacaatggaagagtcggttactatttcgtcgaagcgttctgttgagtgatgtacgaaatctaccattaatgaagacacgtcctgtgatgtgctgtcggcatcgtcagaaaggcttttaagtttaccccatactgtcccgtcttcgctttccgattccgtgccgatattatcggacagctttccgatattttcattcgcttttttagcggattccgcagcttcgttggctttcttttgtgcagcatcagccgtattctttgccgtttctacatcttctttttttgcatatacggaaaggttgcctgtcgttgagacaagtttccaccccggattttgaaaggcgtagatgttaccattgtcgactgcatcgggggtattctcgtcatacaccgtcacgatctgaccgaatttcaacggctttccgtcagaaccgaccggggaagtactgtccgcgttcatctccgcgacggtggtgtatgtgttacgaatccccaacccgatctggtttttctccgcttcgttgatgacatccagcgtttcatcaatcaagccgcccacttcttcaggtgatatggataaggaatctttctttgccgaaagttcctgtgcccgtctttttaattcgtatattgttgccattatcagttaaatctttaatgtatcctcgattaaaatagtacttgcaggcatttggacaagtgggctgccatctgctgaagctatataacagttgccgttatcgaatgtgagttgaacaatcattgattgtggattatcccatgaatctgcatacgacatcgatagactgaacactccggaaatattctttacagacgaatcaaatgtacataatctccgtttgccgttcacttcaggagctatcatggaagttcctgtattggcagcagccaagatattaaaatagacagtttcattgcccgtctgttttgcccggtatatgatttctgcttttccggaaacgacttcacttagggataactgggctttcatgtccttttctattatggtcttgtccaaataatctgtgacaatagccaatattttgttcctgaatgttactacatcatttctgcctacatacatatctgactttgtatatgttgttgacagttttacatacctgcgctcatatacttgcgcttcggaattgtccgcaaatatttcattttgaaatttttcctgaacaaccacccagtatactggttgtgatgtaggcacagtaagaatatccggttttatcggataaacttcatcacctatcacgatatatccatttccgacaatagtatacactgtattggaaccaaggatttccgtgctgaccggatcgcttaacagaatatgtttctctcccagtttcatcccggaacaaatggctttcaatacgtctgctgtggattcttgcataaattccaaatcatccaaataaaatggctgtccgccttctttaaataacagtttattcatattcgtatattttaaggacgtaggttcgtccggctggtttataatagtcaatcaagtttttaatctcattctcatacgttgacaggaacgacggtatgttcaccatgtaatttcccgaatagttcccttcaccgcgctgctggatgtgtttctttcccactccttcaccccgtttatacaggtaggacgggatttgctcttccctgcggtgatacaggtacgattcttttcccgcaatatcagtgatgtatatttccctgtttttcaagaaaaacctgtcgttcagcactttctcgatatatatcacctgaccgtttatattcagcttgttgatagcctgtttacggtagcttttaaacagggtgtaaatgaagattaaagggagaaggaagatggatatgattgcaaatatcttccttttcctcaatgacggacgaagcacatactgcgcgtatttgataatgtcaaaatcataccacataagtcagggaggtttcaaggctgttcaggatgaagcacccggctacagccgtatagttattatttttaattacgttatattccgtagcggatgccgcttttgcggcacattctccaagttcgacgtccagtacgccttcaaccctctgtatcgcgtcaacaagttttgtcttattgaatttaccgccatactcgatacctttcagataatcgttgatggcggcaagtactggtttactaccatccgtcaggcggataccggaagcgttgataaccataggatcgacttctatggtcgcgttgatacggatgtcatctgccggaattgactgtatcgacaagattaccccggcaatcttgatcgaattcatatagcttttaaatgccgtcagaacgtccccggtcaaaggacaaggaagccccccctcatctccggacacgagtatctgaatacttcctccgcgatctttgactgccacatacttgacaagctgtttggttttgtcgataacggaataccggaactggtatttctccggatcatagaccagcggatcaccatactggaaagccagcgcactgctatgataccatcgcacggtcggtatgatattggcgtcaatccgttcctccacgtccgatttgaactggtcaaacatttgctctatgacgtgcgctgttgccgcaaaaatgtaaaacagggtactttctattgatacgggggaaaacaccgaatcaaagtcggcatcacccgtgatgccatacaggtcacggataatgctgtttgacatataggcatccgtcatttctttctttatttctgcgattgttctagccattacttaaattgttcggtaaactgttcggtgaaaattctcaatcgtaccgcatttgaggcggtttcagaagtagccggacaaacggagttccgctggcagtaatcagccagttcactgttatagaccttttccggggtttcgatttcctgtccggcttgtagggtgtccgttatgcccatatcgttcgtcctggcaagcatgaaagccgcttcgattgtaccatattcctgcacggctatgtccagcagggtttgtccggcttgtactacagttttcatcttacatttttataaataaaaaatacaaatgcaataaaaaaggctgctattacggcttttgcccacggaggaatgtacgcgaccttttcaacgacctttgtatcattcctctcctgtttttccagttgctccttcaatgtcagcagggtttcctgaatttcctgtatttgtacctgaagttgttcattataggtttctttctcctgtctggtagacgttcctgtcgctgtctccgtggaggtcgggtattgtttcccggtcgaatccggtggcgaatagttcgtcttctgccagttgaattccatttgctgcatcatctcgatcattcgctcaacattcttgtttacgctgacctgcgctttgtctgtagaaacttcttcctgttccgtctgcttctgttccgtgttatcctgatggacggtcgtgtccgttttggacgatcggcaggaacagacggacagcaccacgattgtgagtaaaaaaacgagtatctttttcattacggtcgaacgattacaggtggtaaaaatgaggtaaattcactctttacgtcgaagcagggacattctttcatccactcgcatttttcgacgatgccgttcccgttcttgtccggactggtatctcgatgcccgaggatatcaataatgtcgtggcggtggcagatgtcctgaacgagctcgcgcatcgctttcttctgtgcgtccgtccgggtatcctttgccttgccgttcttatccagtccgccctcatagcagataccgattgaacatcggttataactggttttctcaccgggaacgataaagttatcatgtgccccgatttcgttttccgcacgcatgggaatcacgcgaccgtctttccggatataatagtggtatccccattttccaaagccacgggctacgtgtgaatcattaatttgcttctctgtgaaatctttgtcctcgcgtgttgcagaacaatgaatgataatgtatgtaggtttattcatctttcttttcctccttattttctgtttcgtcttctccttgaatgtatttcttatacttgcatttatacctgtaatcaactccgaagagtgcgcctgcaaaagtcgaaacttcgccataggcgactaaaaccgagttgtcaatctgtcccgtaggtactacccaaaatccgcaaaacagcaggatcattccggatacggacaggaaaactgcgatccataactgtacgtgtagtcttttcatgatacatacaggttatagaatcagtcggaaaactatccataccagtaatatgaccacatccgccaacaatgccccgcgtaccgtcgcccggatgtctgccatatccggaacatcgtctttcgattccttccatttaccagccagccatgcggatacagttcccaaaaccatgccgcccaatacgctagggaagctcaccccaaacaggaaaacagatgctaccacgcacacggctaaaatgagcatcccaatcagtccgtgaatgattttgtctactccgaactttttaatcagatcgttacttgctttcattttcaatcattttaatcgttagtaatttcaatatttattttatccaccagctccgaatagtcaatgcccgcgcgtttcaggtggattttcatttgtttctcaatggctcttttatcagcctgtgaacggatataccggatcaggttcgcacccagcaccgggtcttctttcaactcaccctgattcagctcaagcacgattgccgcattttgaatcagagtgtcaccgattacgaacccggtcagcccgtcttttcccttatgggggacaattctgatatcaccatccttgtcgagtaatagtcctttcattgcttcaccctttcgttttcaatgtccctgacctgtgtctcttttagtgattccgaaatgtaggaagacaatgccgttttcaaagccgatcccccgtcgttcggtacaggtgtccatcctgacaatttctgcttcaatgaattgatgtccttttcaatcaggttcagccgttccgtcagttccccgacttttaccagtccgcccaatgtcccgccattcagcacaatttcgtccacctcatcagcagaaatcaggaaggcgtcagtctcctgtccctcgatgattccgaccagacaagttgttcccggtttcggatagatgcataatgcacccattcccaactggacatcataatattcaagctggtcaatgaccccggtcacatccattgccttgttttctttatcaaccttgtctaccgttacccagcgcaattgcgcctgtctagccccttcgcgccatttttcaagcgcatcacgtaactgttcatccgtagtcattccgcacgtcctcccaactctaatttttgcctgtatgtagcatcgtcactgaaatcctttgtcaccttctcaacgtaatagtatccgttcatttccggagttatttcactcttcaggtcaatcgttataccgtggcggacgacaggtatcccgaacagttcgacgcccccgcggtacttctgctttttaaggctttcgtagaaatctctggcgaacttcttcaggtcttcgaccttgacggactttcctttttcattgtaagtcaggttatagacctcacttccttccgttccggcttttgcttccagtttcttgccgccagcaccgatgctgacaaccttgacctgaaactcaccgttggtttcgttcaggttctgactgacggcatttttttccagtacgattttcaccttttcggtgtcgaccttttcggaatagacatttccgcaatacaggactttgccgatgaaatagcagtggaggttggttttcttccggatgtcattcaggatttccgcgaccgttctggaagaataccgtaccgcaccaagttcagcatcatagttcgtcttcacctcatagcctttggcaacgtctgcaagcagtttcttcagtgtgacattctttgcggaataggacactgtttttcttttcaggttatacatttcgtcctcgcaccggatcgtcactggaacaccccagccgatcagcgatatatatccttcaaattccgtgtacaggttggaatcatatccgagttcaatcttcacctgatccccggcagacagcagttccttcaggtcttttccggcaaagtatttgatacgcctgggaaggactatttctgcagagtctgtcagcatcttccatgaactttcgatgtgaaccgacgaaatcgtatagatgaccagttcctcgcgtctcttgtttgccgggaatgtgatccggctgcacatcatatagctcatagtgtcagttcataagggttatcactcgttgcttctatcgtgaacggaactacgctgctgtttccctgaatcggattgaacgaaatgttatcaatgacaatggagtaaatttccttgttgttgaagatgcttcccgtaactccgaccgcttccgtcactttgcggaacttgcagagcgcgttcacttgttcggcaaccgtcttataaccttcccggcttttgtctgctatgcagaatccccggatattgattttccagtcgtcgagcccgtagacttcctttacagttccgtgaacacccaataccttcgtttttgaacagttcatcgagcgcgaaaagtccacgatcgttgcatacggcatcggaaaactagccatattcatcgtgccgcgtgacccgtccggattataggtgctgtattgcttgttaccgtcaagggtaaacgtcccgatgaccggagtccccatccagctgtatgcttcggcttcggcatccggaatcgttgtcactccgatgtatttccccggatcgtaatcctgcagggttcgtccccacggaagataaatcggggatgaaatcccgaagacctccgtgaacaatgcaccaatatttaacgctgtatttcctgtcataactttatcctattgctggtactgtatcggttatcaccgctaaaatttcccgtttgaccttatccgcaacatcgcgcatgtccgcacctgccgcaaccctgaaatgattgttgaatgtcacgttcatggtgatattcctcacgctgcttccaccttttccaccaagtcccacgtctttcccggaagtccccccggttgaggttgtgacggtggtcggtttgttgactgccgctggtgcggtgtccagctggaacttgtcaagtccggggactttgtccttgttccgccagctttcccgtcccttttccttgccttcttcccatgcccgaccgactgccacagcgttgtcaaacacttctttctttacccgttcaaatacgtcgtcaatgctccagtcatccctgaaccagttaaccggattcagaatttcaatgattcccatttggatggtatgaatcgtcttgaaaaaggaaagaaagcccgttttaaggacttcccacagcccgaacaggaacacacggactccttcaaacttgttataaaggaaagccacgaaagcgatgacagccgttatgattgcaacgatccagccgatgacagggatacccatgatagcgacggaaatcagccggctacccacgattgtagacaatgccattttagccatcgacgcaacccaaaccccggcaatctttgttattccaagtgacatgatctgcgaaatagaccatgcgacagttccgagcgtgacaagcgcgcctacaaagattcccacaacttcaatggcaggggcaatcggttctacaaattcaaagaaactgatcttcaggtcgtcgataaacgcttgcatacgtttctgcttttcggcataagtatccatttgtttatttgccatgtcgaccgcagaagtagaaccctgtatcgcttccgtccatgtgtcaatttggtctacaccctcaatcaaagccatcgctgaagcaaggttttcacttccgaacaacgcggacatgattgtagcgttgtgcatgaccggagtcagggcacgcagtcggtcagtcagtgaaagggactggttttgcatcgtttttatattgaccccggcagctttcagttgcttgatcgcgtccgtagtcggagcctgcaatttgactatcgtgttacgcaaagcgataccgccttctgaaccctttttccccgatttgtcaagcaactggatcagggagtttgtttcggcaaattcaaccccgaatgtttttgcaacactacccgtttgtttcaatgcttccgcgacctccctgatttcggcagacccttcgacagttcctgccgccatgatgttcatatagtccgtcatagtttgtgcggctttcatcggatcatcgagggaaaccttatactggttcatggcggtggacatggctgcagacgctccggggacgtcattttgcatcgttttactaagtgtcattacattattcgacatgatttcgagcgcgtccggtgcttttttcagttccggagtaatctttgaaagcaagtccttataaacgaccatagcatttgacgcatcgacaccgaacgcttttgccgtgttacgggctttggtggcgagaacgtccagttccttcccctccatgttggtgataccggacatttcggcaacggcagtttcaaaccggacgcccggttcgatggcgtcgttaaaggaatcacggatattgtcaacaccttccttcagctggttgagaaagaacattccctttcccagcccttccagttttccggctgtttttcccgatgtctccccaagacgttcaaccacttcctccgtgtcgtcgattacccgtgtagcttcttcggctgcatcggttgccgcatgtagcggagacgtgatcctgtcaaccagttccaatatccattgagtcacttgcattgtcttttgagaataatcggtttacaactttagcgaatgcattgtgcattactatttcaaattcttccaactccgttttccgcaacatgcggtattcggcatagagccggagccattcatcttcgtccagtttgtccgggatgtcgaagccatatacttttttcaggatggcatctattccctcgacaagaccgaacgctgatgaatattcctctatgctttgctgataaaagccgcctgtccggcaatcagttgtccgatggcggtcaggactgaagtatagacggtagaatcttccaacgcctccatattgccagccgccacgcagttccggatcaggatgtcatttgcttcttcaagatcatcctttttctttgccatagccagcaggatgttttttttcgggcggacgatcaggtagtcgtaacgttcatcctcgtccacctgtacggtgacatgcttcaggcgttttccgtatttcagtttcagttccgtatgctcttcctctgtgaaatcgacaatcaaagccttttcctccgttgtcagttcctcgtaaggctttccagccttgattttcatttcttcttctttcattttaaaagtcttttaaacggttattaaactacattgccacattccagtcgatatggctgggaagaagggtgaattgtgtggcaatgcttttatcaccctgtttaacgtccacgccattgtccgtgaattcgacgttccggattacgtccttcatgacaagccctttatactcatacatgaccggaatgtcgaacggctcgatatccgtgagacgctttcccgaaccgagtgtcagttgcaaggcgttcacttcttctttcagaagggtgatcgatgcttcagccttgtaattcccctcaccgcgaccgacaggaaattcaccggcaccgtagatgttgtctttctctttgctgtctttgtaggaaagggctgtgataccctctacctgacgaccgagcatgacaaccttgacgctgttccatccggctatttttccgaacttgttgattaatgttcctaacaatgccatattttcagattttatttgtgaaacccaagtcaatctcaaactcatgtacaataccgtctgcaaccagttttaccttgatattgaaaggcttgtcgctgacagccatctgtttgggattgatataaatgtcgaagtctgcaatatcctccgaagttaccatagtttccagtgcggatttgacaagcgcgtcccaactgctgatcgtggtattactgatatatccggttgacgggtcagctttcaccttacttctcacacgcggtaacaaggtattgcggataatacgtgccgccttgttccaaacagcgttatattcaatatatgcatagtcgctgtccgcttccgtacacgtacatgaattgctgaaaaagaatccggcatacccttgaaagctgccgacgaagatatacccttggtcagtcagttttttctggtcggatacgctcaactgtgagaagggtttgccattgctcaaggctgcatccagccaaagcccgttcagtttgtcagtcaatggatagtcctttgtcccctttgccgtccgtgggtggttttcaatatcaacactgcccatattttcatgtacatagcggacagacagcattccgagtgcgcttcctacggcagcgtgtgtccggtatgcttcatcctttgccgcccgtgccgggtcttgtgcaatcacgacagagacgttttcagcatccaacttccggaggtcgacagcatcggcaatggcattgatatactttccgacaccttccaatattaccgcatcgatatacaggtggtcttccctgaatttattgaccatcttctgtgcctcttgtacggctactgtgattgtttcgtccgcagtcagtgagcagataccgatggtgtttactccgttgatggtacgtaccgcattgacgaaatcttccttcgtcagcaggcttgacactttttcagacttcggaaccagcataagatacagcgaacgttccggagacaggcggaagacttcgctggtatggtaatgcaccagttccttgttttcaagatcaatggtatcatcccaaccaagtgcttccaaatcggtaatgtcgttgaggttttccggcttgtaatattcaagttttccgatctccgatccaccgaccacgagcaagatgatgcggtcactggtatcggtatcccgtaccagcccgccattaactttgttgatgattactcctgtaaaatttcccataaaataattcgttatacggatttacctgataaaattgcaccaacaccgaaatcttcaatacggtctacaataccgtaggtttgggtacgatattcggatgtaggactcttgctgcgtgtatcggtcgtttccggacgatacagggatttcacggattcgatgtggtaatacgtattcggagcatagaagaacgtgcttgcctgaaagtccgtttcggcagacggttttgtgccttccgccaccttcttggctgtttccgcattatagaacgggcagtcgttattctcaaagaacttgatacccatgaagcctttcggttttccggttgccggatcaaggtagaaagtacggtcatagaagtacttggacgcatccttatccagcaacaagtcacccatgtgcaggggggaaagcaccatgtacagggcatcggtaacgggaaggttccacgtctttgcgagcgttgcaaaatcgaccagatccttataagacagtctcaaacgaccattaatatctttctcacccgttgtccggataacaggcatttcttcgtttgaatcatcctccggagccagtttgtgcagcacatggttgcggataccgacctgaaaggcttcattgtgcttcacacggatagcagcgcgcttgtcaaaagcgagataacggatttcgtcatccgtacaggaactgggttccgtatcgtagatttcccacggtacgatataattctttccggtcatttgcttcggctcgaaatcttccgtgttgtttacgcgaaaaccgacattgttaatcagtttgtttctgcgtacaccgtccgcagccaaagctccggcaggaacagagcctaagacctgcatgaagtccgccctgtaattgcgacgttcgatcaacagttggggatcgacgtacttgttcaaataaagaccgtctactggttgtgccatattcttttttttaaatggttagtattttattttccgttacgctttatgtagtcattcaaaagacgttcgtattcagccggattcttctccatgatatttttcaaagcctccggatcgttttgaaggtcttcgaactttttgtttgtggtatccgtcagactgggagcatgaacttccggcatttccacaggcttgatagcgtcgagcagcttctttgcggtatcgaaattgctggtcaggttcgccttccagtcgtcacgaacgtcggctgtgattcttttttccttgatcgcactgttcaggatgttttcgatttcctgttccttgcgtgcctcctcctgtctttcgagcatgtcgacgcggtctgccttacgcttccacacgtctacctgtgcgatgaattgtgcttccgtggtacttgcgtccattccgaagcgggtagtcaacattgttaaatccatgtcattttttgatttttcgttattaatagagtcagtaatctcaatttcacctgtgtaaccgcagttggtaatcatttgtgccatagccttatcgacttttgccttgcctgtaacttccgtcacaaagccgttttccttcgcttcctgcgcgctcatccagtagtcgcccttctcccaggcgtcccggattttcttcttgtccgtgcactttgacaggaaggcattcagatagtgctcattcagtttgcgcatgacctccaaagccgattcaatatcagcgactctcccgcatgcccctccgctgacctgatggatcatgaaaagtccgttggcaggcatggagaacgatgtgcaattgatagcgatgtaggttgccgcactggctaccagcgcaccgccttcacccgtaattttgccgggaaacttcttgatcacgttcacgatctcgttggcttcgaagcattcgccaccgggagagttgatatagatatgcacatccttgattcctgatcttatcagttgctcaattttggaagtgaattccgcttccgtctccctccattttgatattgtgcctttgagttcaatccgggcacgtccgttttccgctgttgcagtcagattcattttcgcgatatttaaaatttcatactgcaaaattggaaaaggaaaggcgggtacggaaaaagcgttttcatcttggaaaaaaaacagtgttaacaaggacgtattttttccaacttggaaagaatacgttccaacatgaaaagccgttttccacaggtgatgatgaaatatgacctttgctgcgtaaacgaaaggaagcgatatgccaagcaaagaatactaccgtaaattgaagaaggaagcgcacgacctttatgtacgtgaaggaatgacgtgcaaggagatttccacacgaataaacgtgtcggaaaggtctgtttcaagctggattaatgagaatgacgcactttggaaaaaagagcgtcaggcatctgttatttcatcgcaaaagcagggtgacaacctgaaacagattatcaacattcttgcagaccaaaaactggagctgctgcgcatgattgacgaagccattgcggaaggtgacagcgacaaggtgctcgaactacggaaacaggcggctacgcttgacaacagtgtggcgcaatggggaaaccagctcaaagaggtggacaaaaagaaccggattacgctcgctatttacattgatgtcatgagccggatattcgatgcgatgaaggtgtacgatgcagacctttattttaaaacactggactttcaggagaaccacctttatgaagccgcaaaaatgttgggataatgaaagtcgaagatagcaaagccctcaaggagtatcaggagaagttaaaacgtgcgcggtgcacgggcaacctgattgatccggacgaatcgctgacagttcggatgaaccgcatacagcgtgcgaagcgggatgtcaagtatcttgtcgaaacctatcttccccattatgcgaccgcagactgtgcggactttcagatcgctcatgccaatagggtgatgaacgatccaatttataaaggatatgccgaatggggacgcggacttgcaaaatcggtatggaacgatgtgatcattcccctatggttatggattaacggtgagacgcattatatgtgtatcgtttccgacacatttgaccgcgcttgtgacctgctggaagatttacgtgcggaattcgaggcaaacgaacttttgaaacacgactttggcgagcagtataatccgggatattgggaaaagggaaacttcgtaacgatgaacggctttatttgcaaggcgttcggtgcgaagcagaaggttcgcgggcttcgtaaaggcgcacatcgtcctgacctgtggataattgacgacttggagacaccgcagaccatcaaaaacaaccggatgcaggatgattatgcggactggatcgaagcggacgtgctggcaaccatgacgggaaagcgcagacgtctgataggtgctaacaaccgttttgcatcccggatggtacagacgattctcaaacaacggcatcccgactgggactggcatctggtgaaggcttatgatccggtaacgtatgaaccagcgtggaaatcgatgtattccgcccagttctatcgtcagcaggaaaaagacatgggcattctcgcggcacatgcggaatataaccacgtaccgcttgtcaagggtaaaatattcaagcccgaaatggtgaagtggggaaagctccctgaccttcacacgatgaatgcgatcgtggcacattgggacattgcgtatgccgggacagatacaagtgactttaacgcatgtaagatttggggacgccataaaaatgatttttggctgatagacggattcgtaaagcagtcaaagatgaaactctgcgtacaatggatgtgcatgaagcaggctgaattcagggcaaagggcattatctgtttttggcaatatgagagtcaattctggaatgatgaagttaaacggaacattgaggaagctgaagcggaaacgggggtggagcttaatttggttccaatacaaactcccaaaacgatgaccaagttgcttcgtatgctttccatgcacccgtattatcagaacggtcgtatgtatgtcaatgaactgctaaagtcaaaccctgacatagctgtcggcttaaagcaattgtatgcggttgaaccgggtatgacagaacatgacgacagtccggatgccgatgaacaggcggtgaagaaacttgaaatatacactgatcccccacaatcagaggatgaacccgcgtcacgaccgtggaaagcgggaagatataaacgtaaatacacttggtaactatgaagtacatcaacatggatgatttgacaaccatcatacagaatcggttgctgatcgaaagtatagagaaagaagaagagatactggcagggattgaagaccttgtcataagtgaagtgtgcgcctatatcggtggtcgttacgacgtggggaaaatatttggtgatcctccgatccggacagggttgttggtacgtgtggtcgcatgtatcacagcctgtcgtgctgtcagccggaatgcaacccgtaaagttccggattccttgtcgggcttgaacgattgggcggacggcatacttgtcaaactgcgcgacgggatcatgactttgccacaggatattcccccggtaacggatgaagacgggaacgtgcaatatcccatattatacgggcacacgcgcaatggtggatggtttctttaaatagtttttaaaccgcttttaaaaggtatgttatgtacaagaagttaagagaaatattcaactggtttcaacagaaggctattcgtcggatgagcctgaagaatatactcaatgagtattattatcgaatggacagcagtgggttgccaacgtcaggaacaatgtataaaaggcaggctgttgtttatcgggaaaagaccattgacgactggatcatgtcagtgaccgcagctaccgatccggatgatcccaggcgtggtttattataccgcttttttcagtcgttatataacgatgaacatttgcagacgaccattgacaatcgcgtcttacctgtgcaacaggcaaaatataaccttgtggatgataatgacaatgaagatgaggaagcaaaaaaattactggatcgtccatggtttcaccagcttatcagaatctgttttctgcatcagttacagggggtatcgcttgccgatctttcccaccttgatgataatttggaaattagccatgtcgaagaaattcccatgtcaaattacattccacaacaacaaatcatcatcagggaggaatcagaccagactggatggtcgtacaaagacggtgcgcttgaaccgtactatgtacaattcgggaatccgtggtcgctggggatgctcaacgaactggcggtcatcattcttgccaagaaattaggattgggggcatggatgaattatatcgaaaaatatggtgttccgcccgtctttgttacttcagacagaatggataaaaagcggatggacgaattattcgaaatgatgacggacttcaggaataatttctttgctgtgctgcaaggaaacgaaacggtcgagtatgggaaagaagccgggggaaatacaaccaatgcttttttaccgttagaggaacgatgtgacaaccagatcagtaaacgtttgctgggtcagacgggaacaactgaaaacggtgcgtgggaaggtacggcagaagtacatgaacgtgttgaaaaatcgcggcacgaatatgataaaatgttgttccagttttatttcaattacattatcattcccaaactggtaaagatcagcccggtatacaaaccgcttgaaaggctgaaactgaagtgggacgacacggaaagtttgtctatcacggaatacatcgaagcaatcaacaagctggcttatacctttgagtttgaccatgaagaagttgctaaaaaaacaggtttgccgatcattggtcaaaagaaaaatcccggtggtgagcagcagggaggaacattgccgaatcagccccaaacagaccctcaaaaaaaaaagaccgaaccggacgatgaaacggtaacgtcgcctgtcatggaagccggggagtatgatttcagcagtatcatcggaagagtgatgaaacaggtttacgaacgtaaagttaagacagggaatattgacggggaattattcagaaagacatacgaggaactgaataagaaggcggctgaaggatggggagaagacgactataatgatccggaacaggcggaagaacctcaacggatacgtgacaacttgttcaagttctccggagcgaagacgtatcaggaaattaaggagatgaatgatgccctttatgatgataaggggaaaaaactttcttatgaggacttccgggaaaaagtaatggcaattcataaagactataatgaaaattaccttcgcacggaatttgaaacggcagaaacaagcggcagacgcgccagtgaatggcaggaattcaaggagaatgcggatataatgcctaacctgaagtatgtgactgccggggatgaacgggtaagagaatcacataggatactggatggtgtcgtaaaacctattaacgatccgttttggctgcagaactacccgcccaacggatatcggtgcaggtgttatgtcgaacaaacggacgaaccggaaacacctgctacgcctattgtgacgataccggatgcttttgcgaataacgtaggtcaatccggtgagatattcacggttgcacatccttatttttcaatgccggacaatgacctgataaaaatcaggaaagagacggagcggaataaaatatacgccccttatcatcgtgatccggaatcgaaagtgatgatcagcgactttgctgatccgaaagacttggcaaagaatgtggaaagcgcacgggtaatttcaaaggaactgaagatgaaagtaaaaatccgcccgcacatcaacgaggacggggtaaagaacccggaatatttgattgacgaaaagctggcagacctgaaaaatattcaggggctgggcggtataaaacacgggcttgacagttcgaaaaaacagcagtgcgaatatactgtattcaatttgagcgcttttgacactgtcgaaccggaaatgctgaaaaacaaactgaacggcatatacaaactgtatggcgaaaagtatgccgggcagcggatggtgttcatttataagagaaaagccgtgaaagtgtcatggcaagacgtggtggacggaaaagcaaccgaccttcttaaagaacttcaggagcagtagccgaaactaccactcctgaagggagctcttgacctgttacagccgcgaacattgcaaatatacaattttattttgaaatgcaaatggaaagaactgaattacctgatttttttaaagaattatccacactggtagaagatgcgcaccgctacgcgaaagttgcgggtgtgaacttcttcaagcagaattttcgcaggcaggggtttcttgatacatcactgacaccgtgggctaaaaggtcactcgcaatcggttcggatcgtggcgtattgatacaaagcgggaagctccgtgacagcatacatgcggtcagccgtggaatagaccgtatcatttatcagaccgatccgctggcttatgccaagatccacaatgaaggcgggtacattgtcgtaacggagcgaatgaaacgttatttttggtatttgtacatgaagtcgaccggatcaatgcaaaagaggaaaaatggcgaattacggcaaaataaagccaatgagcggctgtctacaatggcttctttttacaaaagtatggcacttaaaaaagtaggcagcaggataagaatccccaaacgtcagtatatgggtgagtccgctacgtttatgaagcaactcgatacatggatcgcatcggagattgacaaacgattctcgaatatttaatctatatagttatgatttggacagactgctacaaagaactggttgaaataatacggagcaaagatgagttcctcgcatctatcccggatgagtattccgagctaagggaacggatggaaaatacaccggggattgaacatatagacatgtggcatgaacaggttagttttctcgatgaagaacatcccttttcgtccccggctgtattcattgaatttaatacgctgggtattgaggatgaagggttactcgttcagcggcttcacacgcagattgatttccggctgttttacgaaactttttccgatacctacgaaggtgcggctatgcaggaagaggcgttgtcctttcttgacctgttgacattgctggggatgatgttacacggaaaatcgggaaagaacttcggcacgctccgacgtacccatgtcggacgggaagagtcggggggtgcgggaaacctgtaccggatcagctttgaatgtgaaatcatggattacaccacaatggaacttgcaagccatgccgacatgaaagaccgtgaaatgaaaattagcaatggggacttaccggagaaaacggaagacgaagaaccgctgtatcatctatgatgcaacggttaaaaaccaagactaagttgatttgtatcgttcttttttgaatcgggctttttgccctcttttaattgttcgtaatatgataaattctccgatatataaaaaatccgtttgtagatgtagttctgatcaagaaagaacaggtcatgactcatacgcaaaagaacatcctccaaacggatgcgctttttatcatagagaagatagaacgtttctaccatcttccggtcacgtattttggtcatttcaggattccgcataagaaagcactattataagcgcaaatatacggattttcagtgatttgtcaaaattgaatataagcctgtgggggaaaggctataaaaaagcccccagcctgttagtaaagacgccaatcacatactaacaaaatgcgagcagacgcacagccgggggcaaaaacccttgctgcgtctactcgcatttttgttttatgtgattggcattgcaaagataatcaaatttgtattattattataaacattcattttaaaagagtatgagcatgttgaaagaagaaattgcgggtatgactaccggatatacagtaaatgcaccacaatgggtgactacgttcacaaaagcaccagagtttaagtccttttataagaccgtctccggaaatgaaggaaataaatgcaattacccgacacgtttagacctctacggctgtggatgctttcacgactgttcttattgttatgcaaagtcactccttaatttcaggggactatggcatcctgataatccatctgtttcccggacggacaaagtggggaggaagatctgcaaattagagcggggaacagttgtgcgtttgggtggaatgactgactgtttccaaccttgtgaggctgtttacagggaaacctataaagcaattcagaacctgaaccgacaaggggtacattaccttatcgtgacaaagtcctcaatggtagcagatgacatatatatccggttgatggatagaaaactggcgcatatacaaatatctgtgacttctacggatgacactctttcacgtacatttgaaaaggcgtgtccgccatctgcacggattaaagctattgagaagctgcaggagcaaggatttgatgtctctgtcaggttatcaccatttatccctcaatttattgattttagggttctgaacagtatcagatgtgataagattctggtggagttcttgcgggtaaacacatgggtgaagcaatggtttgatattgactattccgaatacaccctgaagcatgcagggtataatcatttgcagttggagcgaaaaatcgaatatctaaataagatttcaggattcaggaagatttcagtttgtgaggacgtggatagtcattttcagtactggaagaagaatgtaaactacagcccgaatgattgctgtaatttgagaatataaaattaagccgcgcaaagattttttcttgcgcggcttttctcgaacggataatcatttgtagaatatgtatttttcttcgcaataaatgcaatgattttctttgcaatacttctcaactgccttgcgcgttttaaagtcttttacttttccgtctttcgattgaatatgccccacattaaagtcttcatctatctttaggggaacaaaccttgtttgggtattaaatcgtttcatgtttatagttattctttttccattaattttaaaatcctgttgaactcatcacggctcatattggtaggtacaaaagatgcttttacctcttcaaacggacgaagagaatgttttaatgtttcttgagcttcctcccttgctttttgggcacacatttcaatatattcttcatctgtcatattataatcactaacagtatctatcaccgttgagaatcggcataaaagcccattcttttgtcttgcaataaagctcatctattttgttttacttaaaattaccactctactttatatacgccattccaattctcatctatagagaaacgtattttatatccgacttttattagtatatgtcgtacatacgaagacagatttatgaatgtgtgcgaatgttctccacgttctttcgcctcttcgattattgctactacttctgctatatataacattctattcctttccgtattgttattagtcaattatcaaaatttcacgatatgcaatgtctatctcattcgtcttctcattctcattgaaacaatagcaaagaaaccatttcaacgcaccttcattctcatattgtgctttccacattttaccattatagagagctgacggtcgagaacaagtataatccatgagtatttcaaaatcaagtctactcatcactgcatgagtatcatcaattagtatcaagtaagttggcggctgttgccaacacatcccataaggatgcgtcataggtggaataatattatctttattcattattatcttgttatacgttatttttctccttgtcaaattcagctaaaaacatctgtaatcctacccccattgagcacacaccatcgaacaacttatacatcaattccggctcttcttcccaaatttgatagactattactttttttcctgctcctttcatccatcctgcctccgaatgtgcagagcgtccacaaggcaatacaagaacacaaacatctgcccattgcattgcatcaaaatcagatttgaaaccagcctgtgcaatgggatgttcaagcgcagccctatattggtctgtactccaattccgccaatcttcatcaatctgtgaccactgaaatccagtttttccagcaggatgcctaaaatcgtaaacctcatgtccctgctcgcgaaggaaactaactacttgtggttgatgttgatttctccaactacttgctacataaatctttgccatattcttattcctttctaaattaaatattatcaaaagccgatctttcccggctgttatccctttattttaaaactccacaataagccaaaaccgataaggaggtaaatatacctattactgatactaaatatagaatcagtagatcctctaagctattatcttttttcatatccaatttaatcttctactattttatcatctgttagcaaacgtttcattgcccggtctctttccgcttttgaaggataattgtccccataccttttccaactatccggatttatatcgcttttaaaagtgatatgcggctgggggtaatcatggcgacgcaggattgtatagccggctttgcacagttttctttgatcttttgcattcatctttttgctaattagaattaaacttgattctggcataacgatagaatcgtatataaccaaactggtaggaagggtgctccgtattatccgatatggtaatttgtacattataaccttttattcgtaagaaacgggcagcaatttcctcaatagtgtatgtttttatatatatatcccaatcactaacgaccaatatcgttttcacattcccacttttcagaatccttttaaaatttctgatagtgcgtattatctccttcttcttgttcatactttagttttatcctcttttaaaatagttttataggcttcttccatccgttcaatctcctccacacatgccagccatccgggaaaacctccgatgtttttgtcatcgatatagcaatgggcatatatctttttcccgccttccccatatttagcgacattttcaggatcatggtcatttacacggtcgaatggtattttgcgttccaacagccagttgatggcattcaataactgatcaccagtacggcatgtccaaataatgattttatgtccttcatcatgtaatttccggagcgattcaccagcgtatggttgctccccgtcaatagccgggaatctcccccggctaatggttccgtcaaagtcaactgctataatcataatctacagaatgaaggttcaatacgacgccatactccgttctcgtcacgcttatggaaatagtaattagttgcagttttatacacgacattactttctttaaacagttgcatgatagaggcatattcttcatcaaaacgtgactccaattcatataatttgctgatagacttatagtccaaatccccctgacggttacgttcgagaagcgtcatcgccatttgatacatcggatcatcgactcctttttccgaatgggctatataattcttcaggtagtcaatcagcctttcggcagcgagatcggcacgttcatcaaaacttttcaccttgttgctttttacctccagtttgaagttcccgtctactactgaaaaagtggcggtttcttcaccctgacgcatacggagctgaccgtattcacgcatcacgttacggaaagccttgctttcacccacaatccaatcataaaagccctgaacatcattcactactggcatgagtttactttccacatcgaacatgaactgatgtctcaacgcttcgtaggtttccttccgctgaatggactctgttttttcttcctctttcagtttacgcaacagttccgccttttcttcttttgacaatttactaatatccatactattaacttttaaatgattaattacaatttgattttatatacttctttcagttcccgttccttgttttccgcttcgatataaagcgatgacctttggtctaccaacttcgcaaactcgttacgattcatatttccggcatacaatttttcgtgtatggcatccagctcaccgggaatcttgtcaagccgatccagtaattcattaatccggtttatccggtgttgttccgcactaatatccgccatcttctttcttttttaatattgactccagcttcggtatcaacaggagaagttcttccccgtccagttcgcgaaacttctttcctgctatccgggtatcaaggcaaaacgcattcaccgctccccagtccgttgtgtcgattccgatccgctgcactctcttcaggacagccgatctgcgtctccttatttcccgttcggtgatggttagatcctggttttcttttttcgcaccgttcaaataaccgcagagatacattgcctcgctgtatgtcaactcttttgtggtatttgtccgtccgtctgtcaggtctagcaggatagcccgcttttgttcgtcatcaatgccttgtgcgctgtatatgatatgcaggcgtttgataaggctcttactgataggtttcttcgtcttctgttccatcattatcgcttttaatattttcaatccaatatttttgatacccttccgcccatactatgtaatatccgcgtgaacctcctttgccacgtccgataaatgttgccttgaaatgttccacgtagattcttttaaagctgtcacgtttcacgtcataggctgtttttccttccacctcgcgcccgtccacatgcgagatgaagacaaatatctttcgcggatacttcttgcgcaggcggattatttcgggggctttcgctcccccttgctgctcgaagtattgtatggagtctatcattatcacgtccgggctgcgttgctttgagaggtattcgtccagttctgtgatggtggcttcatccgaatagattatattattcgttttactatgaatgccgacactaagaacggaattcacgaagtcgtcgcacgcgcccatttcaagtgttaaataaagaacccggagccccatttcatcaaatttgcgtgccagctgcagagcgaaagaactttttccttgtcccgactttccgtaaatgatccagcaaccggatttttccggacgaccgaatgccagataccattcaccgtcaaaatcaatatattcatgtcggatgtcttctaggttcttctgactccaaactttcatgccagttctccacgctcgatttgttgtttgattatacggtcttcgatcatgccggacagttcacgcaaatcatcggtaaaccaaacatattttcccggcacaggctcttttttctctttattcaactttccccaaatgttttcctgttcctccgtatcattgatcccgtttgccgcgcaaatggctttgacatccttctttgtggctcccagtaatgcgatgtagttccggcaaaatctgccgtctatttcgtcgtatccttctacacgaccgacataacgctttatattgcgttccagcgtctccgttccggctacgatagcccccaaacggtgtaaagtatcatcatatagaggtatcaacgtacaaagggcactgtgcgccagttttccggcatcatcaaggattaacaaaggggattttccagccatgcggtttatgtgtgaaacaaccaagtccataaggtcatcgttatccatatagcgcgttaccgtttcccccatgcatgtggctaacttggtcaggaatttacgtgccgtccacttccggcatttcagatatatgactgaattatcagtactcatgttataaaggtctatgagggattgagtcttcccactgccggatcgggaagatatgcacatccatttgtgattccgtttggctgccacgaacgcggtgcgtacctgctggtaactggtgacgctttccactacattccaggcgttttcgtagtaattaagaccggaagcgatcttttcagcgatagagtcttcgttagctccatacttgccgcttctgaattgggacatggcggtatccgatattccacatttacgcgccaactccgttgcagatgatccgcgattgattaacttctctatgtacgtttttaatgcttgattatccatgttgtatatcttttaaattgtttttaaatcatcttgaaaaattcatgtccagcgggttgtaatcgtaatcttcatcatccgttccggtggaagccattgctacactttgccgggtgatatgttgggtcacttccatgaaatccgcgtccgtggcgtcatccctcattttcgaccggacatccttgtgctgtcccaagctgtcggttatcaggtagcggtcaagaaccgttcctgcagctatttcggggatacgttggcaaatggtggtgattctcctgtctacctctttcactttctccttcaccgtttccaccatttcagtgttgaacctgtcgacacgtgcccggtattcaaaatgttccggtttctgatcagccaaagccatcggaactttgatatcacgttgcagtacgtattgcaatgtcccgatctctttgtcaacacgaccggacttcaggcgttttgcgttcgatacaagcacctgactcatatcgtccgggtcaaagcgtactatccagtcttcgttgtaatggtcgcggagggaaaggtcgaagctgtcgaagcagattcgttcacccatgaactcgataaacagtcccgaacctgtgatcttgtttgtgcgtccggtggtttcccccatgagcatcagatattcctcaatcccgaaaggcattttgcgggcttcttcggtacgttcccatgcagcgcggtaagcatctatcttctttgcccgttcctgcgctattatagcctctaattgcgcaataacggtggcttcatccgggatgaacttgtgattctggtttaatacttccaaattaggctggttatctttgtcggcagtgataccgaagcccgaccagttcgcctgtttttggcagtattccacgttcagccgtttgaaatagggttctacaattttggactttgcatttcccaaagcggctggtgtatagtacttggtcatggcttcatagaagggaaccatcaccttcttttgataattgtcgctttgtagctgtaaaggcttatagcgttccccaaatagctctttggtatgttgtaccgcatttcgtaatgcttcacgaataagagcgggtgattcatggtcgccaatggcataccctaccggatatttttcacatgcgtcaagtacgactaccatcgttttccggttggtataagtggtgtacatatatctcttttcctcaccgtttttctttaccgttttgggagtctttttctggtagaacagttccgcatcccatccgtccagcgtccagtaagtaagtgcttgtgtcggggcttcgcggtgtatctgtttcatgcgtgtgttcttcagagctttgtctcccttgtttcccgccattgttgtgagagcaaatttttgtctccagttctcaacggtggtaggactatcgatcggtttccaatccatcagggaagccaccttgttgtattcttccatgatttgaacattattcagattgttatgcatactgattaatttatgcatcactgcctttgcgtcctcgttcagtacgactgccgcgtatttgttgccatacgatttatggatgacactgcgatagccttcttcctcactgatccgtcgtgccgcttcatattgctcgcatttacgtttcaaagccttccagttcttcggcaggttatgaggaaaaatatcacgcccgttcgggtctttcagtgtcagaagatcattgctcaacttacagagcttttcccaaacgttgatgcgcgtaccaccaccgcctatcgagttggctttacgaccatcgcgaagggagaggagcgcgttcatgatgcgcacattaagggtatattcgtcaatcttcgcggggggaagcttcttgtcaccgtcatagcggtatttcacactgaaaaactcgtaggcggcattgctgtagacaatcgcatcttccagtatggatttctgtgttttagcggcaatttctgcacggggatcacctttacgtacaatgtaccctttctttacgtcctttctcatggtttcaaaatctactagggcaggacatccgggaataccacgacggagtacgataagttgcccgttcctcaccatcgaatagtatgttccttcaggaatgaacccatcttcactcccaacttgcgttttgggattgaagatgattaattcattcgcaaacacgcaaatccgattattaaatatctcagccataataattatactattaactttagcgcaagtcccggcactgccccaggattgtagctgcttcccctcttttcacctgttcccattgaaaacctgtcctaacaccattaaataataccatgacaaattcaatctgaaaccatgagtctgtgttatcccgaaatacggggaagttccttgcttgcatacttgttttactcttcgtccttttccgaacggaattccctttcaagaatggtcactatcgtgaaacaggcaataacaaaagccgcctgcacattagaggcagacacctcaatcccgtcaaccaatgaaacggtagttattatcccgaccgctatcaacacattctgaatcactctaaatgttttcatatactatatcgtttttcttgttctacattcatgtttctaaaaaggctattcctattcatcacgaaccggaatagttttgctacatttgtagccaatatggaaaatatttaatttaaataaaccgttatgatgtttttcgatgatttggaatctaaacttgcatcagaccaaacaatatgcaagagtatactccgagatgtaaaatgtcctgttcataagctaaaggcacgtatcatctatgattacgacaaagacttcacttatgcccatattacgaaatgctgttgtcctcaatttgcccaaatagtggcggatacgatccgtaaaacagagactattgatgtagtagtaattgacgactgtgaatatactcgctgaattggacaactttctcactgaaacccggcacgtgtcaccaaccatgaatagtttcttcttgaatctggcatggttgccgaggcgtagcacatcatctgctgttaagttatcacccatgacaatggcttgaaaaataatgcgatctatacgtttcaaaatcttattcttttgcattgcagatttttatttattgcttattactcttgttacatttccgtgagaatccaaaaccttcacttttgatggttcattaccttcagtatatttaattccaccattttcttgtgccattctacgaatagcttctgcattctttccattccgtttgaaacggagtatttgactaagatttgcgagagatattccaaatgtttctgcaatcatctttcgtttttcggtgtctcttaattcaattatttgtttcatacctttttattttagagtaattattcatacatttgagcgctgttaatctgtaacacgctgcaaatataatagagatatttcaattatgaaagaaaacatgagagatttttcagtattaaagcagagaattctgcaatatttagattttaaagggattacaaagtatgaatgttataaaaatacaggcataaccaatggcgtgttgagtcaaccaaatggaatgtctgaagataatttattgaaatttctctcatattatagcgatatctctacggattggttgcttgctggatgtggttcaatgttgcgtgatgacaatcaaacgaaaatttctaaaatcgttccaatagagtcggaatttgagtcaatccctatcgttgatatatctgtagctgcaggttatggatgtgaaaatcctgattttatagaagtcgtggagactattaggcttccttacaatatgctacgtaggaatagaaaatatttctgtgttaaagtacgaggagaaagtatgtctccgacattattagactgttcatatctcattttaagattattggatcgaagtgaatggaatgagattaaagacaatcatgtatatgtggtaagcgacagaagtggacgtgcttacgtgaaacgcataaaaaatagattccgtgaacatggttttatagtttgtacctctgataatgttgataaagctaattacccaaactttaatttgatggaagatgagattaatactatactatatgtggaatggtatttaagcgcaaagatgcctaatattaacgcgacgtattatgataaagtaaaccatttagaagacgatgtggatgctttgaaaagtcaaatgtccctacttatgaaaaggttaacttaatattaaacattatattttattataaatcattgttttttagcatattaccaaaaatatctgtattcctaaaagttgtattatagggtataactcaatgcatataccagtattatagggtaaaactcaataataaaaacacttcttttttaatgggtgtttaatgggtgatattcacattttgtctctattttctaatgggtgtttaaagggtgctgacatgggtataggctattttaacaataaattatatcttttccataagtctgtatttatcacgaaataaacaaaaatacatcctattttcttcatttatttcgtatatttgcaattagaaaaacttccatatagcaactatatagaagtttttagtattacaaatatctaaaagtaaagtcatggctaaagagactaaggttatacatgttcatctcattttcaaaaaaacaagccgtttttttggttctatatcagcaatctattctgaatttactgctgaagaaataggtattacggaagaaaccctacgtcacaaagggttgtccgatggtgtttccttcgctactaaaaaagcgatcatacaacaaggagtgcttattcgaagcgcacgaaaatagcattttaagccgctgtaatgtatttctatatctaaattaataaaggctatacacccatctaaatggagcgtatagcctttgttttaagcctaaaaacagaagcaacatacagtctttccttcgccttttcaatctgtctctcattgtttcccctatttacagcacagtccaccggaatgaatatagaagcaacggaagcaaaatagaaggaacggaactttttgttttcttcccaaatatattgcgtgacattcgtcaatcaccgatgtacaggcggtttcacgtacttcaccttacatttcattcatgccacattttgtattgagccccgtacaaagcagcagagagaggtattatacttgaagtattataaaaaactgaattcggacgaaatagccgaagtgatgggactgacttcccgtactgtttataatactacccacatggcaatatccagactgagagagcgattgagcaaatcattcctgttgactgtagctgctaatttatggatttttaattgaggtgaggatatggagaataggaaagaacttctggaacaatatatggaagacggcaaacttcctctgaaaggtgagttgtttgcacggaagtctgtagttggtgggaagttagaagaatttcgtgaagaaaaacgtgcggatgcattaacaagcagaccgaacgctgcaggaagacagaaactgattgttcttaggagcagttgtatctactggagagtagcggccctgtttatcctgcttttcggaataggcggttattactatctgtcggaagagaagattacgtctgaagcagtagctgtcgattacaagctaccggatggcagttctgtgaagctgatgcaaaactcaactttgtcttataataaagtgagttggctttgggggcgtaaactgaatctgctcggatcggccttttttgacgtgactccgggtaaaacatttactgtacgaacggaagccggagatgttacggtgttaggtacaaaattcttggtcgagcaggaaggaaaaacgatcactgtcaattgtgaagagggaacagtgaaggtagagacaccaatcggcgaacagacattgaatgccggtgaaagtgtacgctgtgatgagaataagattggtcctgttcaggaaaaggaagaactgcccgaagtactcggttatgaagatgatccgctggtcaatgtagtagcagatattcagcatatctttgatgtggaagtggtagggtgtgaaaaatataatgaactgtactataacggaaccatcctgacgagagatctgcacgaaacattgaaaaaagtatttggttctttgggaatcaattatcagttgagcgggcagaaagtcatattagaatagacgggaacagaagtccacaccgtaaaaaagagaaattatccttgatataaagcaggaagtgaaatatttctgcaattaaaaaacgcctctcagagtgctctggaaggcgttttttaattaaatctattttttcttctatttttcttggtaaaaaaggaaagaaagctcctcttataaatataaggaactatttataaacagacaatagataacaggtggatgaactgtccatggctagacagaattttaaggggagtaaattaataattaggtagagaattagattgcttaagagaagaagtctcttgaaaagaacgaagaatgatgccaattgctgttttaaaagaaagcaatagcgaacgaattggcaattagtaagtgagtttaattttattgttttccaaatgtgagagaaaattgaaaggttttctctcacattttttatggggttacggattcgtgagcatcagctttttagtaattttaatatagtcaaacaagataaaactaagatatcgtgtttattcatcttactttgtaggttgtaataaaactagtgatgtaaataatgaataaaaatggatttagtcgatgtgccgatatctatatcggccgtttgcgagaggagggccgctattctacagcgcacgtctatcagaacgcccttctttcttttagcaagttttgtggtgtccatagtgtgtctttccgtcaagtcacccgtgagcgtcttcgccgttacgaacagcacctttacgaatgtggtctgaagcccaatacgatttccacgtatatgcgtatgcttcggagtatctataatcggggtgtggaagccggcagtgctccttatgtccaccgcctgtttcatgaggtctatacgggggtggacgtgcgtcagaaaagggcgcttcccgtcgtcgctcttcgcaggcttctttatgaagatccccagtctgaccgtctccgccgtacccaggctatcgctgctctgatgttccagttctgcgggatgtctttcgccgatctgagccatttggagaaatccgctcttgatagcaacgtgctgcgctacaatcgtgtcaagacgaagactcccatgagcgttgaggttctggacagtgcacaggagatgctcgaccaactccggaaccggcagtctccccgtcccggctgtcccgactaccttttcggcattcttcacggtgataagaagaggaaggatgagagagcctaccgtgaataccagtccgctctccgaagattcaactactgtctgaagtctctggcaaagcggctgcgtctcaacttccccgtcacttcctacacgcttcgtcattcgtgggctactactgccaagtaccgtggtgtccctatcgagatgatcagcgagtcgcttggtcataagtccatcaagactacgcagatttatctgaaaggctttgaactgaaagagcgtacggaggtgaaccggatgaatttgtcttacgtaaagcggtgcggagtaggtcagtgtatctgatttagaagcttgatatacagtgtttatcggtgtgcgttacttcttaggtaacggaatgattcatggcgcaaagatggacatatttatgaaaatacgcaaacaaaaatgaaattaatttcggaaaatgaatcaaatgcaggcataacaggcggaaaatgacaatatccgtgttatgtcttttttttattccaattcatgaaaaacaccttcacttctgctttatttcctgaataccagtcctcttctgatgttttcgttgaaaaaagttcccttttctgcttgccctatgcttgttcgttacctaagaagtaacggataaacatggggtaaaaaaatatgattttaagaaaaaagaaatcactaaatgctgggcctattaatgggacaggggaaggcgtagcacactcaaaacgctggtatgttgctttggttcggatgcaccatgaaaagaaggtttccgagcatctggacaagatgggtatcgagaatttcgttcccgttcaacaggaattccaccaatggagcgaccgtcgcaagctggtcacctccgtcttgcttcctatgatggtcttcgtacacgttgaccctaaggaacgcatggaagtcctgagtttttctactgtcagccgttacatggtgatgcgcggcgagagtagtcctgctgtaattcctgacgagcagatggctcgtttccgtttcatgcttgattattcggaagaatcgataagcatgaacagttctcctttggctcgtggcgaaaaggttcgcgtgatcaaaggtccgttgacgggtcttgttggcgaactggtcaatgtggatggtaaaagtaagattgctgttcgcttgaatatgctgggatgcgcctgtgttgatatgcctgtcggttatgtagagccgattatggcggctgtttaaggcaagggatatggatgctattattttacaagaaaatatagagggtttattaagtttggtacgtatgctgcttcctggtggggggagtgcaggctgcgtgtatttggatgatctttcagcattacaacgatccatccacgaaaagattaacgatttatattctcaacggggggagacaccggagcaggatgctaccctgtgtttggccatccttcagggatataatgtgtcgatgtacgccaatccggaagacgaagaaagaaaacaggctgttttgacccgttctctgtctcttctcgatgttcttcccccttctcttcttaagcaacagttatctgccgtctgtcatgggatgcaggaactgtgtgaaatcaactgaaacttttttatttgtcaatgaaaatacaacgactttttagcattctactattttgtttgatgctgggaagtggctcgcttatggctcagtccatgagtgactcacaggtactggaatatgtaaaagacggcatccgccaaggcaaggaacagaagcagcttgcttccgaactagcccgtaagggtgtaaccaaagaacaggcaatgcgtgtgaagcagctatacgagcagcagaacaatgtaaatacctcgaaatcaacgggcacggacatcaacgaatcccgcctgcgtgaagagactaagaagaatacttccgatatgctggaggatcatccgactactcaggaccttgcccgtggtgatcaggtcttcggacgtaacatcttcaatacccgcaacctgacgttcgagcctagtgtcaaccttgccactcctgccaattaccgtcttggtcccggtgatgaagtcatcattgatatctggggtgcgagccagaacacgatccgccagcaaatctctcctgaaggtactatcaacattcagaagatcggccctgtcaaccttagcggtatgacagtctctgccgccaatgactatctgaagaacgccctgaataaaatatataacggtctgaataatactaccgatcctacttccgacatccgtctgacgttaggtaatatccgtactattcagattaatgtgatgggagaagtcgtacagcccggtacctacgccctttcttccttctctaccgtcttccatgcgctttatcgtgcaggcggtgtgagtgatatcggtagcctccgaaacgttcagttggtacgcaacggaaagaatattgccaccatcgacgtctacgaattcattatgaaaggcaacacacaggatgacatccgcctacaggaaggtgacgttgtgattgttcctgcctatgatgtattggtaaagattagcggcaaggtaaaacgtcctatgcgttttgaaatgaagaaagacgagaaccttgctactctcattaaatatgccggcggctttgaagctgatgcctacacccgttcattacgtgttgtccgtcagaatggtgaggaatacgaagtcaacacagtcaaagatatagattacaacatttataaaatgcgtaacggtgacgtagtaaccgccgaagccatccttaaccgcttcacaaacaaactggaaatccgtggcgctgtctatcgtcccggtatctaccagctcagcggtaaactgaacacgatccgcgaacttgtccatgaagctcagggtctgaccggtgacgctttcctgaatcgtgccgtcctctatcgccagcgtgaagacctgaccagtgaagttgttcagatagacattaagtctatcatggacggcacttccccaaaccttgccctaatgaagaatgacatcctctacattccaagtatccatgacctggaagaccggggtaatgtcacagttcacggtgaggttgcccaccctgattcctatccttatgcggataacatgacacttgaggatctgatcattcaggccggtggcttgaaagaagccgcctctactgtccgtattgatatatcgagacgaatcaagaatcctcgtagtactgcggataatgatacgattggtcagatgtataccttctctttaaaggatggttttgtaatagatggtcagcccggttttatccttgagccttatgatcaggtttatgtccgtcgcagtccgggctatcaggcacaacagaatgtagccattgaaggtgaaatccttttcggaggaaattacgccatgaccagccgtgaggaacgtctttccgatttagtgaataaagccggcggtccgaccaattatgcctatctgcgtggtgcgaaactgacccgtgtggctaacgctagtgaaaagaaacgtatgggtgatgtaattcgccttatgagcaggcaattgggcgaagccatgattgactctttgggtattcgtgttgaagatacttttacggttggaatagatttggaaaaagccttgagcaatcctaaaagtaatgccgatcttgtcttacgtgaaggtgatgtgatctccatacctaagaatactaatactgtaactatcaatggtgctgtcatggttccgaatacggtttcttatatgaagggaaagaatgtggattattacctgaatcaggccggtggctgttctgataatgcaaggaagagtaagaagttcattgtttacatgaatggtcaggtgacgaaggttaagggtagtggtaagaaacagattgagccggggtgtgagattattgtgcctggtaaggctaagaagaaagggaacatagctaatattttaggttatgctacttccttcagttctttgggaatgatgattgcttctattgctaatttgataaagaaataaatgacctattatgattgaaaagcaatcttatcaagaaccgttttctgaagtggataaaaggaaagatgatgaaatggaaatagacttgatggctattttttataagattattactgttcgtggagtactatgcaaagctgctggagtgggagtaataattgctatagtggtggcattgagcattcccaagcaatatacagtaaaggttaccctttctcctgaaatgggtaatgcgaagggaagtaatggtttagccggacttgctgcctcgtttttgggagatggggctctaataggggaaagcacagatgccttgaacgcttctctttcagcagatattgtttcttcaactccttttttattggaacttttagaaatggaagtctccgtttctaaaaaggatgataaaatgactttggggtcttatctcgatgaagagtcatctccttggtgggattatcttataggttttccgggcatagtaataggaggagttaaatcattattcggagaagatacggttcctgccagtggagggcggcaaggaactatcgaattgacgaaagaagtaaatgagaagattaattttcttaaaaagaagattagtgcatccattgataagaaaaccgccataacgagcattacggtcaccttacaaaatccgcagatcactgcggttatagcagattctgtcgttcataaattacaggaatatattattgggtatcgaacttcaaaagtaaaagaagactgtgcgtatttggaacggttgtttaaagaacgtcagcaggaatattatgctgctcaaagaaaatatgcggattatgtagacgcccatgataatgtggttcttcaaagtgtacgtgctgagcaggagcgtttacagaacgacatgagtttggcttatcagatatatagtcaggttgctaatcagttgcaggtatccagagccaaagtacaggaggaaaagccagtctttgcagtagttgagcctgccgttgtacctttgaaaccttcaggtatgggactcaaaatttatattttattatttgtgttcctgtccgtatctggtactctcgtgtgggtgctttttggcaaaagtctgctggctagcttgagaaaagaactgaaaaataaggagatagaacaggataaatgatgctaaaacgtcgtttacaacattcttatatcaattaaattcacttactatattattaaacgaatgatacgtacagctatgataatggctgcgggcatgggaacccgttttggccaatatacagaattgatacctaaagggttcgtcaaagtgggaggtattccaatgatagttcgttctattgatactttgttatcatgtggcattgagcgaattgtaatcggtacaggatataaacaagaagtttatgaagaattgaagacagactatcctatgcttgaaacctgttttagtcctcgttatgctgaaacaaatagtatgtatactttatataatacgcgggagattctgggcaatgatgattttttattgttagagtcagatttgatttttgagaaacaagcaataatgagcttattggagtgtcctgcggcagatgcaatgctaatagctccagtgacaaagtttcaagatcagtattatgtggaacatgatgataattttcgcctttcttcatgttctgtcaataagaataaactaaacgctaaaggcgaattggtcggcatccataaactatccggttccttttacaaaataatgtgtgctgattatgcgagtattgttgatgaacaacccaatttgggatatgagtatgaattactacgaatatcttgttctcaatctcctgtttatgtgcataaagtagaagggctgaaatggtatgaaatcgatgacatatcagatttggaatatgcagagaaatatattgttccgtattgttaattaaaataatatatcaaattatgagtaagacagtttatattgggatgactgcggatattatgcatccaggacttatccgcattattaatgaggctactaaatacggtgatgttataattggtcttcttacagataaagctattgcggagcataaacgccttccttatctgacctatgaacaacgaaaagaggtagttcagaatattaaaggcgtatgtaaagttgttcctcaagaagaatggagctatgttgagaatctcaaacgcattaaacctgactatataattcatggtgacgactggaaaaccgggcctttacgtgaagaacgtgtgcgcgtatttgaagtgatgaatgaacagggaggaaaggttatcgaaattccatatactttgggaattaattcatcttctttggataaagatattaaggctataggtacaacccccgatgtacgtttaaaatcacttcgtcgtttgataaatgccaaacccgtagttcgtattttggaagctcatgatggactatgtggcttgataattgaaaatcaggaaatattaaaaggggataagagggaagtatttgacggaatgtggtctagtagccttacggattcaaccagtaaaggtaaacctgatattgaggcggttgatttaactacccgattgcaagatttgaataatattctggagtgtactactaaacctattatttttgatggagatacaggtggtaaaattgaacatttcgtatttacagtacgcactttagaacgtcatggaatctcagctataataattgaagataaagttggattaaaaaagaattcattgtttggtacggatgttattcaaactcaagatacaatcgaaggtttctgtaataagatcaaagcaggaaaggcatctcagattactgatgattttatgattatcgctcgtattgagagccttatagcgggaaagccggtaagtgatgctttagagagagcttttgcatatgtccaagcgggagcggacggtattatgatacatagcaaaaataagtcgggtgaagatataaaagaattttgtttggcgtttcgaaaacagtatgctcatgtacctatcgtggttgtgcctactacatatgatcatatttatgagtctgaattgtgtgattggggtgtgaatataattatttatgctaatcatatgcttcgtgccgcttatcctgctatgatgaatgtcgcaaagacaatattagagaatgaacgtgctttagaggtgcgcgaactgtgtatgcccataaaggaaatattggaactgattccgggtactaaataaaaagaggaatatcattatgttaagcgtagaaaaagtttatgaaacgtttctgagtcatgacgttgatttttttacaggagttccagactcattactaaaaaatatttgtgcctatatcacagaccatacttcacgtgagaaacatatcatagctgctaatgaaggtgcggctgtaggaattgcttcaggttattatatggcatcaggtaaggttcctgtggtttatatgcaaaattccggcttgggtaatactgttaatcctctgctgtctcttgcagatgaacaagtatacagttttccaatgcttttgatgattggctggcgtggtgaaccgggaacaaaagatgaacctcagcataaaaaacagggtgaggtaactttagatttgttgaaagcaatgcggattccttatataattcttgattcaaatgagaatgatgcatttattcagctccatgatatcatacaatcagcaaaaactaagaatattcctcatgcaataattattcggaaagatgtttttggcaaatataaacttcaaaaagaattcggatgtaattatcctttatctcgtgaggatgctttgcaaatagttgtggattatctgcctgaaaattcagtggtcgtttctactactggcaagctttctcgtgagttatttgaatatcgagaaatgaaagagcaaggtcatgaacatgattttctcacggtaggccctatgggacatagttcatcaatctctttgggtattgctatagcaaagcaagatagacctgtttattgcttggatggtgatggagcatttattatgcatttaggggcaattagtaacattggcgatttatctcctaaaaactattatcatattttgtttaacaatggtgctcacgagtctgtaggaggacagcctactttaggatttagtttagatattccggctattgcccgggggagcggatataagcatacttatactgtttgtacaaaagttgaaattgaagaagcaatgaagcagcttccaaagttatgtggtcctgttttgttggaaataaaggttaagatagattctcgggagaatttgggacgtcccacgactactcctatagagaataaggagcattttatggattttttaaaataaatatattcgatgaaaatagaaagaaaaatattattaaatcctgggcctgccactactactgacagtgtaaaaatggcacaagttgttccggatatttgtcctcgcgagaaagaattcgcaggtatgatgaaacaacttcgggacgatttggtcagagttgctcatgggaatttggaaaaacatacagctgtattattttgtggctcaggaactatcaatattgatatatgtctaaattctcttcttcctgaagacaaaagggtgcttatagtgaataatggggcatatagtacccgtgctgtagaagtgtgtcaatattatggtttgcctcatattaatttggaattttctgtttatgaacgtcctgatttattggtagtggaaaatgtgttacaagaaaatcctgatatagctatggtttatactactcatcacgagacgggtacaggaattctgaaccctattcgcgagatgggcgctatagctcataaatatcaggctaaatttgtcgtcgatactacttcttctttgggcatgattccttttgatatagagaaagataatgtagatttttgtatggcatctgctcaaaaaggacttcaagcgatgacaggtctttcttttattataggcaatgaggaacagattaaggtttcaaaaaaatatcccaagcgttcttactattgtaatctttatttgcagtatgagaattttgagagaacaggtgaaatgcattttactccaccggtacaaactatttacgccactcgtcaggcattaaatgaatattttgaagtgggcgaagaagctaagtttgcccgtcacaaaagagtttttgaggctattcattcaggtataaatgaaattggtcttaaaagtgtaataaagcgtgaatggcagtcaggactggttgtctcagttcaatacccagaagatcccaactgggattttgagaaaatacatgattattgttatgagcgtggatttacgatttatccaggtaagatatcaactgaggatacttttagaatctgtgctttaggagagatagaagtagatgatattgagaacttctttaaagtactaaaagctgcattaaatcattataacgtcacattaccgatgtcatgattgcagaaatattattgaagattcgtcatttttatttttcccttcgtggtatacacttccatccggaaagtgttatttctggagtgcctattcgtagctttcgcttagtaggcaaatatggcaatattaatttgaggtgatgcattaggagttctttattcttataaaaaggcatcggtagttataggagataatgtttgtgtagggtaatttgcttttagtgggagagaccatattagaattgcggtaaggggcgaagaagataataaccaattagtgagaatattggaaaaatataattgatatcggtaaatgtagttgtttttatactgtatttaagtaatggaaaatctaaagcagaaaactgtatcaggaataatgtggagcgctatagaacgtttctctttacaaggagtacagtttataattcaaataatattagctcgtttgttactaccatcggattatggtatgatcgggatgttagctatttttcttcaagtcgctcaagtatttatagatagcggttttacaaatgctttaatccagaaaaaagatagaactgaagaggattttgccactgtcttttattttaatattcttgtcgcagtattattctatggtatattgtttttttcggcttctttgattgcagacttttataatatgccgactttagttcttgtaattcgttttatagcattgtcgttgataataaatgctttatcggctattcacagaacgaaattaattatttctgtaaactttaaaactcaatctaaaatttcattaggtgcagcttttatatcaggcgtgattggaatatggatggcttatgtcggttgcggggtttgggctttagtttggcaaactctcttaaatagtataattttgacaattttgttttactgtttagttcattggaaacctttacatactttctccaaaagttcttttgaaagattattcaatttcggatctaaattattgatctcaagtcttatcaatacagtatatcgtaatctgtataccattgtaataggaaaaaagttttctgttgtagagcttggttactatacaagagcagaacaatttgctatttttccttccaataatttaaatgctttagtttctagagtagcgtatcctattttaagttccattcaagatgatgataaatgtttaacaaacgcatatcgaaattatatcagattatcctcatatataatttttcctttaatggtaggtttacttgttttggctaatcctattattagtctattgttaacagataaatggtctggggttgttattcttttacagatattatgtttggattggatgtttgatcatttgagccaaattaatttgaatttattatgggttaaaggaagatctgatctgtcgttacgtcttgaaataataaaaaagacgattgctatattcattctttttgtgtcaattccatttgggcttgaggtgatgtgttggggtagagttatttactctctgatagcgacatatttgaatacatattatactaattctcttattgatttgaccttaaagttgcaagttaaagatgtatttccaagtttaatactctctttcataatgggggggatcgtttttatatgtatttctttctttgaaactgatatagtaaaaattgtgattggatgtattactgggatgtccttctatattttactttcttttctttttaagctagattcttttttttgtattttaacattgatcattaaaactaaaaacatagatgaaaatattaaaaaagatttttcaagtaatagtaaagataattaaccattgtgtgccagttgatagtagatcattgtattttattcctcatcctaattgtagaacagataaatatgatattataaattattcgtcagataatgttctcgttctgttaaattatttgctaaaaaaagatagtgctgaatattataaaatatatgttgaaatttatgattcttctcgtatttcagaatatcaagaatatatttatggcataaatcctaatattaggtgtacttttttatgtgcatgtgttggacgttttttctttaataaagtatcttttaaggatatgttgtatgcctttttttgtttttgtagagcaagtaaatgttttacagctactttttattatgatttttcatttaaaaaacgctctcaacagattatttgtttggggtattatactccattcaaagatgattatcatatgggagatcattcttatgataaatttcgtaatacaacatgtaactcatttgattactctattgctacttcttgtttaagtgctagaataatttcaatagattgtggaatctcatatgataaattcaaagtcttaggatttcccagaaatgatttgttgatatcgaaaaataattgcaatgttattaaaagagaaatttcgaaatttgcgggatatgatgtaactaaatatatagtttatactccaacttttcgtgattatgagactgttactgaaggtaatttgcgttcaatactcggatatgttgattgtgatttgttgaagttatcgaaaatactattgaagtttaatgcggctttaattcttaaattacatcctttgcagaataaaacagtcttaaaaaaagatttacccaaaggtatacttgtttttgaacaaacatataaatatggattgtatgatcttttgtcattttcagatggaatgattactgattatacttctacctattttgattttttattggtaaataagccagtcatatttaatttctacgatattgaagaatatcgtagagtaagaggtttctcatttgagccaatagaatttttttgtgcaggtgatattgtttacaattataatgaattgatagatgctgtgatgggacttctggctgggaaagatattcatgctgaacatcgacgtcatatttctttattgatgaatcaatttcaagatgataattcaacaaagagaatatgtgacatatttttaaatgaaatataataaataaaatgaattatgcatttgtggtgcaggcacgtttaggttctacacgtttgcctggaaaaatattgaaacctttctatggtaatcaatcgattcttgacttaatggttcataagctttctgctatatcgaatattccagtaattattgctacaacaaattctgttatcaatgaacctattgaaaagaaggcacttgcattaggggtaaagtgcttcagaggtgaggagaatgatgttttaaaacgattcattgatgttgctgaatattttgatatacagggtatattccgaatatgttctgataatccatttttagatgtacatgcggcaaggcaattggtcgaaatagcaatgaaatcttgtaacgattatataagttttgatattgatggtactccatcaattaaaactcatttcggtttttggggagaatttgtaacgcttgatgcgctgaagcgagttataggatttactgatgatttattgtatcgtgaacatgttactaattatatatatagtcatcctgaactttttaatattcaatggatttcaggatctccagtcgtgtcaaaacatcataatattcgactcacgattgatacgttagaagatttttctgtagcacagagaatatatagggatttacaagaaaaaagagtggaaatatcgatagaagtgattgtagactatgttcgaagacatgcagaatacattcaactgatgaaacaacaaataaaaaaaaattctaaataatgaagaatacttatattattggtgaaatagggcagaatcataatggttctgttgacttggctaagttgattattgaattaatctcacgacctgtacatgaggatgtttttggtatggatttcatgccaatgaatgctgttaaaatgactaaaagagatttatcagaagaattggctgtttctcaaatgaatcaaatatatgacaatcctaattcttttgggcgtacttatggtgaacatcgtgcttttcttgagcttgatgatcaagcgcattttgagatttataaatatgctaagtcattaggattagattttatcgagacgttatgtgccaaaggatgtctgtctttgcttaaactgttcacaccggataggctaaaagttgctagtcgtgatttgactaacttaccattgcttgaagcattagcagaaactcatattcctattatattatcgacaggaatggctggtcaaagagaacttgacaatgcattagatgtgataacgagatatcatagtaatatagctattctacattgtgtatctcagtatccaactcatccaaataatttgaatctacgtacaataacatatttgaagaagcattacaataagtttgagataggtttttctgatcatacaataggtatttctgctgctacagctgctgtagcgatgggagcggaaattatagaaaagcatgtaacaattgatcggcatatgaaaggaacagaccagcttggctctttaggtccagatggggttaatcgtatgattcgagatattcgcatagcagagtgttggcttggtactgaagatctttatatagaaaaaggggtggagaagtctaagataaaacttgaacgttctattgccactcgaaaatatattccagcaggtagtattattcaagagtcggacattcatttactgagtcctggtgatggttataaatggatagataaaaaaaatgtaattggtcattttgctaaacaagatatatcagcgaatgaaataatatatcctgattttattgaatagatatattcctactgcaacttgtattacggtatagagtactgcctgctataagctaagtagtgattaataaataagggtaaaatactaaaaaaatgaaagagataaagcttatacttacagatattgatggcgtttggactgatggcggaatgttttatgatcaaacaggtaatgaatggaaaaaattcaatacatctgatagtgctggtattttttgggcacataataaaggtattcctgtgggtattttaacaggtgaaaaaactgagatagtgcgacgaagagcagagaagttaaaagttgattatttatttcaaggagtagtggataaattgtctgctgcagaagaattatgcaatgaattagggattaatttggagcaggtggcctatataggggatgatttgaacgatgctaaattacttaagcgtgtaggtatagctggagtacctgcaagtgctccattttatattcgtagattgtctactatattcttagaaaaaagaggtggtgaaggtgtttttagagaatttgttgaaaaagttcttggtataaatttggaagattttattgctgtgattcaatagttgttgtaaaagatgaaaaaggtagatataattcatggtggatggcttaaggctcctaatggggctagttctgttcttaggactttagctgaatctacttcaaaatttgaagaatacggtattcagctttcggtttattcaatggatttgattgtgttaaagtcatttgaaaatatagcagctataaatcaacggaaaggattacggtactttattaaaaagaatgctaatgcaaattctatactagcattcatttctatttatgcaatatatttgcggcatgctcgtaagattgttaaatattattttgatcaagggcttgaggaatcgagaatcttgtttatacatgatatttttacatgttattactatttgaagtatcgatctagaagacaaaaaaccgtgttggtattacacaataatggtgatacttttaatatgcttagacaatattatcctgtgcttaataaatcaaggctttatagtatattattatacattgaaaggaaggttttatctgaagtggataaggtgttgtttgttgctgagaatcctaaagatacttttgtacaattacatccagatattcctattgaaaaagtaggatttgtttataatggcattttgagcaaagaaatgcatatatgtccggaaaaacatctagggccacttgaaatctgctgtgtgggatctgtttcaaaacgtaaagggcaagatatgattgttgaagctcttgtgaagatgtctcctgttcaaagagagaaagtgcattttaccattgtaggtgatggtacattaaggggggaattagaaaagttgtgttttgagaaaggaatctctaaatatatagattttataggtgtttcgaatcaagtagaaaattatttgttgaggagtgatatttttatgttacctagtagagatgaaggattccctatttctattttggaggctatgcgagcaggacttcctattatatctactaatattgcaggtattccggaaatggttttttccgggatcaatggaattgtaatttcgccatgtcttgaagatatatatgatatcttgtgtcatattgaatcttataattggagtgcaatgggtaaactctcttatgaactatatcaacagaaatttacgcttgattcaatgattgaatcttatgctaatattttgaacgctatatgaaatatgtcttttggatacatagtagtacttcgtattatatggcaaaagctattatagcaaaagaaaatttagattgccataatgttgtttatttgattgatcggaactatgctaataaatatcataataatattgatatagaaattgaagatatttcattttggatgaataagttttatccgatgaaaattaaaactatattaaatttgaggaggattattaaaagttttgattgctatatatcctgcttgattgctgatagttttactgtatatattccccaattaactactcctatatttcaattactcatcacacatcattcatgtgtaggatatcattttatggaggagggccttgcttattataaagaccaactttacaaggcatctcctaataaatttccgttactagtagaattattatttaaggtatataatattttttgtcgtcgtgtacaattaaattatccgtttttgaaaccttataaaaagagtcggtttcaacctaaatattatttacttaataataaatataatgtattaagggagaatgtttctttggtttcttggattaaggaagagacttttttcacatctattccttcaggtgcttctgttttggttttaagtccaattgtagaatatcgtttggcaactcctgagaaattctatgcaagcatgaatctgttgtttaattatatttcggattcgcatgtgtttattaaagcacatccttatcaggcttctagtgttgtgaatactttggttggtctgttagaacaacatggaaaaacttggactcttattccaaatgatgaaccttttgaacagatccttttatctgttgagaatctttgtgtgtttgggacagagtctagtttgatgttttatgcgacactgcttggtaataacaataagattatttccaatcgtaataatttggcttttaatgatattatttttagaaaatatgctcaaaatagtgagtccttagttgtaaatagttatattcaaatttaaagatgttgatttattgggttgttttctttattctttttctttttagttatgtagaacttatttccgctagacagtccttggtattattaagatgcgtgattctatttatagcatgtatggtgggatttcgttataatataggggctgattgggagacatatgtaattatttacaacaggcagattccgtcgcttctagatccagaatatagaattctcatggaacctcttttttggattttagggagtttatgtaaaactctaggtttaagttatgcgtgtttttttataatattgtcattgatatcgtttgtcgtattatttatagttattagacgaattggatgtggatatatttatttgccaattcttttatatttttgtttgtttttctgtcagttccagctaaatatagttcgccacgggattatggcttcatttgtgtggctagctttttcatatataaaggaatgttctttgaagaagtttgttttttttcttttgatagctgcaggctttcaacttgctgcgttggcctttttcccattttatttcttgttgaatagatgttatatgcagaagagtgttgttactcttatttttatatcattgatttttgtaatgttgggagtatcacaaaaaatactgttattgggtactaaaatacctgtttttggggaatttgtaaactattatattctagatttttatggacggaatgttgatgcttcttatggtttttctgtagggatgattgttaatttgttcctttttttgtttctttattttggaatgcgttccgtctataatgatatatctaatcatttgaagatttttgtaaacttattactttatagttttatattgagttgtttttttaatgcatatgcggtttttgtagaacggttagtgagcgttactaatatgactttactatttatattaccttacgttttgcataaaatctttattggaaaagttaataaaacaatagcatttgcttgcattgttgtatatgcgatgttgatgtttactaagacgctttatacaccagttccgttaggtggaaagtatgaatatcagtttattccttaccagtattcatttgttatttaagggattataacgtttggtagatgagtgtaattcaatttgtcttttctgtgatctaattggatgttctgagagtaatatatcctaattttatcaatatctgtttctttggatattgtatccatatgtaaatttatcaaaatgtcaaaattaatattttcagtacttatttctgtatattataatgaaagtatttcttattttaaaaagagcttagatagtattttatatcagactcttttacctgcagaggttgttttagtcaaagatgggattttgacagatgatttaaattgtattgtcaaagagtattctcaaaaatatcctattttgaaagtgatttctttgcctgttaatcaaggacttggtaaagcactgaatgaaggcttaaagcattgctcctacgatctagttgcccgaatggatacagatgatattgccaaacctgatcgttttgagaaacaaataagggtttttcaagagcatccggaattagatgtagtaggagcatggatcgatgagtttgaagaaactacttcaaatattatttctacaagaaagttacctgaggttcatgatgatatttgtcaatttgcaaagaagcgtaatccggaaaatcatccggtaattatgtttcgtaagcaagctgtattagcagcaggtggatatcagcatttccctctttttgaggattactatctgtggatacgtatgctacagaacggtgctaaattttacaatatccaagagagcttattatattttcgcttttcaccggctatgtttaaacggagaggcggtttaaaatatgtgacaacggaactacgttttcaaaatcaactaagaaatttaggattcataacttcctctgaatatctctataatgtctttatacgggtgattactaggatgatgcccaacactttacgagctatcttgtataaaaaagctctgagaaaatagtctttaaccaaactataattaataatttatggaacaacaaacaacttttattcccgacggaatgaatgcttttgagcgcaatgtaaagcgaattggggattgcattattgcgggcatattactgattattttttctcctttatttttaatctgttatatagctgtgaaacgtgaagatggtggtccggctattttcaaacaggaacgtatcggtcgtttcggccgtccgttttatatttataagttccgcagtatgcgtttggatgcggaaaaaatgggtcctgcgctatataggggtgggaaagataaacgattgactaaagtgggtaagtttttgcgtgaacatcatttggatgaattgccgcaactttggaatgtcttctgcgggcagatggcttttattggtccacgtccggagcgtaagtatttcattgatcaaataatggaacacgatgctcgttacgtatttttgtatcagatacgaccgggtgttacttcgtatgctacgttatacaatgggtacacggatacgatggataaaatgttgcgtcgtcttcgctatgatttgttttatttgcagcatcgctcatggtggtttgattttaagatcttggtgaagacatttataaatatttgttttggcaagaagttttagcagagaaaattgttgtatttatagtgaaacaccgttgttgaatacgaagaagttggtaatgggcagaaaaaagcaatatctctttgattattgaaggaaaatttctttctttgtaatagactaaaagtatctattatgttaagtactatagaatatctatcccttcttcgtaaatacatgcgggagaatgctgttaaatatggtatatctcgtatgggaatatttggctcagtagctcgtggtgagcaacatgacggtagtgatgttgatatatgcgtggagatagataggccttctatatttactttagttcatattaaggaagaattggaaaaactgtttaaatgtcctgtagatgtagttagattgcggaataacatggatgaattgttgagaaactgtataaataaagacgggatctatgtgtagaaaacaaatcaaaaatgatttgccccaattgaaagaaatactggaacaaatcattgatgagtttgataagtgtgattgacctcctcttttacaactccttatattcctctacacaccgaaaacacggacattctttcatcggattcaaatcatgatgccctactatcaacgcttttggaaacctctttcgtaactcacgaattaaggctaacaacgatccccgttgctctagcgtacgtgtgtctttcgcttgtccttctgcattcagtcctccttcgtaacagattcctatggaatgtgcgttatgattccggcaatgtgctccgactttctctaacggtcgtcccggatgtatttccccatcacgtgtgatgtagaaatggtaaccgatatcacggaatccccgatgtcggatatgatcctgtcggcaagcctccgccgagagggattttccctccggcgtggcactgcaatgaatgataatcagtgtgatggtccgcataagtttacatacagctttgtactcctatcaaaccacctacagcagtagcgacagtgatgattactttgataatgaaactccaaacggaacgggatgatgaattactcatagtttttgattttaaatgaaaaaaatattgatttttaatgagtctttagccatgataagctaaagactttgcggggttcagggtatgacttaaacagtcgggtccggtgcttcttcgtctccttcgtccggattaggtttcggatcgggagtgttgcctgacccggaacctcctccgggcgttgtcggtttctgatactccgcctgttgtttcagttggctgtcgagcttcagattggtcgttgataagtttccagtggcacgtgctttgagccgcatacctgtgatgttcttctccaatgagaattcttccagtgtttcggcagccttgctgcggattcctacaccgaagatggctagatcatcaattttcacacttttgccgtcgagcagcagttccttgatgcagtccaccatatcagtgagcacgcctttgatcaccccactggaatacggtgaattgtgtttcgacatgtgttcggcaagtttggcaaggtcgaatgtctcgtcgcttaccgcccgggcgaaccatttgcccgcattcaagcctttcttctgttggttctgataaattttgtaacgaatcataaaataataattttaaagagttaaacatactttcgtgaggatttctccctttcgatgacacaaagatagtatgctgtaactcggaagaatcggttgtgtacagtgagagtcggtaatgtgcaattgttgtcagttatagtctgttattccctgataaaacgtaggtaatgtgaatatattttgttacttttgtgacagtaaaacagaaacttatttgtcatgatagaattcaaaatacgtgcttatggtcgtatggaactggcacagctttattctcccgaacttactggcattgccgcttaccgcaaaatgaataaatggattgtccgctgtcccggtcttcaggaacgcctgtccgatttaggttatcagccgcagcaccgttcttacactccgctggaggtaagggtgattgtggatgcattgggagaaccatgagcaggtaataagtattaggtaacaggtaataagtgttgtagactgcgaggggcgttttgtattagctaaagctaagctttagaggccataaagcaccgctttagaagtcgtaaagcatagctttagccaatacaaaacgctatactctgattttcataaagaaacgataaaagacgatgttatcaacaggtacagtaggtacacttttccggcccttccctaacacacgcacacgcgtgcgtgcgcgtaagtacctttaccgtcaagattgacaatcagtccctgttttaccagtcgtttcagccaggtgagggcagtgttgggcttgattcccatagtcgtagcctgctccaacaactgtgcacgggtaaattggatacccagtgcctcaaagaatgcgtcacggtcggcattggccctatggctgacttctgaaggaggaaggaaagacaagatatgcgtggcatgctgatagagtggtttcacaaggttcaacacagccttaaaatcttcgggagtgatcgtcatatcccaacgggtaatgataccgtctttgatattatcagtggcgatttccttgtccggtgtaagcaggggatgagaagatgcctggtattgatacggctgaggattttcaaaagcacgaagcatggccactactgacatgatacggcagatgttgacagccattcgggcgatggaactgttcatttctctgccattggcaatcgttgaccgggtgaacagttcggaaaagagatcattgaactcctgtttctgttcatctgtgagccggagtgtgtggagaccatgttccttgagtaagttcaagagctttttccattccagaccaatggaggtgaagatggcttccaagtccgtttcgttctcgtcaaactgattgatccattgatagatgccgtgcatataatagaacagctggcgtgaaaaaagtccgttctctactgaaggaatgagtggtttcacctgtgcgggtgtccccgaaagcaggagagagaggtaacttttcttgttttcccggtactcctgattggtacgtcggttgtatgctaaccagtcatggtcgaatgctctgcgaagcgtctcactccagtgaccgtattccgaaccgatggcggtagagatcgtatccgcctcggtttcgcagatgaggcctgttccgttgttatccataatattttgaaggataccggtaccggtattgttgccggagatgaggaacattctgtttaaaggtatttcggggatttccgctttggcacgctctttgcccatcatttcgtaggcgacttttgcctttttgtagacattcatctctttttcaacttgttggcggatatcatcgtggataggcataacgagcaggcggatgagtgatagtactcccttgcccgaggctgccggagctacaatgaaggattgcatgcagggcgattggtatttgccggcataatgacatctcacgtatcgttccatggtggcacccagggcagtcaatgctccgagcaagagtacgtctttttgagtggcggtagtgccataacttatgatacgtagcagtagcttcggccagtcttctaaggtgaaagtaggtaatgggtgatgcgggtcgctgccttccagcagttcttctgattcactcttttcttcttctactttattatatacgtgcgcgtgtgtggaaaaattgtgcggtgaactttctgtacctactgtacccgtccggttgttcataacttccttccggtcttccctgcagatttttactcctgtcgattcagcgaggtgaaatgccgttccgagatgtattgctccctgctgtttcgtgagtgcattggaaaacattcgttcggcatgggcggattgatacttggcggaaatccggcacaggcgatgaaaaaactcccgtcctgcttcaccacagtccgttgcgatggcgaatgctaattgtacgtactcggcgtaagtgggtgcaatgtcggcacctgctgtttcgactgcttcggtgaggaggcgtaaagattcaatatcggtcattttttgataattgacaattgacaaatgataattgacaattgaagtttgatcattcgtgattataatttaatattctctgaatagtgcttgtgggtcatggctgaggaagcaggctcttacgatgtctttgccggaggtgtctacggctttttgaactgtttcgatggagttgttcatttctgatccgtaggtcatttctacgtattccattgcccagctcatactctctcttacattacggctctgatcgtctgtgtacaggttgctgtaaggtacgaatgttttcacaccccggttgctgggactgataaatgcgagtacagggtggagaaaaggatcgtcgaacagtgtacgacgcatttctacggctttctgataggagtcgaggttatctatatctaccactacgagtccggaaggagatgcgaagaatttactgttccggcggatgaatgtgccgcacggagtcacgtatggcagcaaggatgttttcgccattcgtatatcttcggcgctgcgcacctgttcggtcagtgctttgagattttcattgcaggtgatcatctgatatacttgctctactgagacttcgcagaagggagtgagagtggcgggtgtaacggtttgtccttgttcgttcctgatgggagcaatcgggggcatgaaataagacattctgaaaaagttttgcatagaatacttctattaggacgtttaataaatgactttgactttcaaagcatggtgcgaaagtaagacaaataaaataagtcgagttcagatatgtctgaagtagtgtgaaaatgtttaatatataagacgtgtttttaactaataataagaaaaatggaaaataaaatcgtgcatcctaaactcggtgagtttattgaaaaggtgcttaaagtagcacatgtgaatctttcaaaaatgtgtcaagagatacatatgggacctgctacttaccaaaaggtaaaaaaggggaagaaaaagctctgattcattatgagcgtattcttgaatattattataggactcgcaccgaagaagagtttttggagaaagtgaatgagtgggcaaaactttatattcgatataagaaggagaagaatgacatttgaatattggaattttttagtagctttgtgaaaaagaaagttgttatggaagatttgcagagattatatcctatagggatacagacattttctaagattcgtgagggaaatttcctctatgtagataagacagaatacgtttaccggatgacgcattctgcttccagttatatgttcctgagccgtccgcgtcgttttggtaaatcattgttaacctctacgttgcatagctatttctccggtcgtgaagaactgtttcgtggattggcgatggagaagctggagaaagaatggatacagtatccggttctgcacttcgatatgagtatggccaagcacgtggacaaagataaactgatgaatcttttagacttcatgctaacagaacacgaacgtacactagggattgatgcagcaggtacagaccctaatttgcgcctgactaatctgataaaacgtgcttatgaacagactggcaggaaggtcgtggtccttattgatgaatatgacgctcctttgctggatgtggtacacgaacgggagaacttgggggtattgcgtgacgttatgcgtaacttctatagtccgttgaaagcctgtgatccttatttgcgctatgtgtttcttacaggtatcactaaattctcacagctcagcattttcagtgaactcaataacatcaaaaatatcagcatggatgaaccttatgctgccatttgtggcataacggagaatgagatacttacccaaatgaaagaagatgtggataggatggctgtcaaattgaatattactgcggaggaagtactggctaagttgaaagagaattatgacggctatcatttcacttatccatcgcccgacatctataatccattcagtctgctcaatgcttttgcagatgggaaatttaattcttattggtttggtagcggcactcctacctatctgataaagatgctggataagtttggagtagagccttctgaaataggaaataaattggcggcggtcgaagaatttgatgctcccactgaaacgatgagtagcattactccattgctgtatcaaagcggctatgtcactatcaaggattacgataaggaattggaactatatacgttggatattcctaataaagaggtgagggtgggattgatgcgaagcttgttgccttattatgtaaccaatgacacacgtgaggcgacgaacatggtggcttttatttcccgtgatatccggaaaggtgatatggacgcggcattacggcgtttgcaaacctttctgtctactatacctcaatgcgatcatacaaagtacgaaggtcattaccagcaggtattctatatcatattcagcttgctgggatactatgtggatgtcgaagtacgtacttcccgtggtcgtgtggatgtagtgttgcgtactgaggccacattatatgtgatggaattgaaactggataagaatgcgacagttgctatggaacagataaatttaaagaattatccggaacgctttgctctatgtggactgccagtggtgaaggtggctgttaattttgatagtgaaagtggcacactgggggattggatgattgaaaaatagagattgataagtgaatataaaaagtgtaaggacgaaggccattttctttaattatcagattaataacattttaataactccctaaaataaaaagagccccgcaaggggcttttcctttgtctttttaatagacatgcaaagaataatgtgttttttcttattgtaaccttacgatttatacttttttattcctctcttaattaattttatcacaaatatttggtattttcggacgctttttggacaaacgacttgaattactaatagtttattatatggaaaatatcgaaacagcgatcctgctgatggtggtcggcatggctaccgtatttgttattctgctgattgtgatttatttaggtaagttactgattactcttgtcaacaagtatgctcccgaagaagtgattcctgcgaagaaggaagcgctacaaggtcctgcgcctattccgggtaatataatggcggctatcacagcagctgtgaatgtggtgacattaggaaaaggaaagattacaaaagtagaaaagttataaacctatcaaaagtatatcatagaaaaacatgaaaagagaagttaagtttagtctggttttccgagatatgtggcaatctgccggaaaatatgtacctcgtgtagaccaactcgtaaaggtagctcctgccatcattgaaatgggctgtttcgcccgtgtagaaacaaatggcggaggttttgaacaagtgaatttattgtttggtgaaaacccgaatagagccgtgcgcgaatggacgaagccgttccacgaagccggcatacagacacacatgctcgaccgtgcattgaacggactccgtatgagccccgttccggcagacgtccgcaagttgttctacaaagtaaagaaagcacaaggcacagatatcacccgtacattctgcggattgaacgacgtacgcaatatcgctccttccatcacgtatgccaaagaggcaggcatgatctcacagtgttcactctgtatcacccattcgccgatccacacggtagagtactacaccaatatggcgttagaacttatcaagctgggggcggacgagatttgcatcaaagacatggcaggtatcggtcgccccgtttcattgggcaagatcgtggccaatatcaaagcggcacatcctgaaattcctattcagtatcatagtcatgccggtcccggtttcaacatggcaagcatcctcgaagtatgcgaagccggttgcgactacattgacgtaggtatggaaccgctttcatggggtacgggacacgccgatcttctcagcgtacaggctatgctgaaagatgccggatatcaggtaccggaaatcaatatggaagcctacatgaaagtgcgtgcgctgattcaggaatttatggatgacttcctcggcttgtatatcagcccgaagaaccgtctgatgaactcgctgctgatcggtccgggacttcctggcggtatgatgggtagtctgatggctgacctcgaatcgaatctggaatctatcaacaagtataaagccaaacataacctgccgtttatgacacaggatcagctgctgatcaagctattcaacgaagtggcgtatgtatggccccgcgtcggttatcctccattggtaactccgttcagccagtacgtgaagaaccttgccatgatgaatgtgatggcaatggagaaaggcaaggaacgctggggaatgattgccgacgatatctgggatatgctgctaggtaaagcaggacgcctgccgggtacactggctcccgaaatcatcgagaaagccgaacgtgaaggacgtaaattcttcgaaggtaatccgcaggacaattaccccgactcactcgacaagtatcgcaagctgatgaaggaaaacaaatgggaagtgggagaggacgacgaagaactcttcgaatatgccatgcatccggctcagtatgaggcttacaagagtggaaaagcgaaggaagacttcctggcagacgtggcaaaacgtcgtgcagagaaagataaatcgccggaagaagatgcaaaaccaaaaacactgactgtacaggtggacggacaggcttatcgtgtgacggtagcatacggagatgccgaactgcttgctgcacctgtagctgcagctccggcaggagagggcaaagatgttctttctccgctggaaggtaaattcttcctggtgaagaatgcgcaggaatctgccttgaaagttggcgatgcggtgaaagagggcgatgtgctttgttatgtggaagcaatgaagacttacaacgctatccgtgccgaatttagcggtacgataactgctatctgcgctaatccgggagacactgtttcagaagatgatgtattaatgaagataggataatgaacgagatatttgagaacttatatgacatgactgcgttcagcaatatcattgccgaaccgcagtttctgataatgtatgccatcgcgttcgtcctgctttatctgggtatcaagaaacagtacgaaccgttgctgcttgttccgattgctttcggtgtgttgcttgccaacttccccggaggagatatgggagtgatacaggcagacgagaatggtatggtgatgataaacggtgtgatgaagaatatctgggaaatgcctttgcatgacattgcgcatgaactgggaattatgaacttcatctattatatgctgatcaagaccggtttcctgcctccgatcatctttatgggggtcggtgcgttgacggacttcggaccgatgttgcgtaatctgcatctttccatctttggagctgctgcacagttaggtatctttactgttctgttggtagccatcctgatgggattcactccgcaagaagctgcttcactgggtattatcggtggtgcggacggaccgacagccatctttacaacgatcaagctggctccgcatttgctgggtccgatcgctattgccgcttattcttatatggcactggtgcctgtgatcattccgttggtagtgaagctgttctgtactaagaaagaactgagcatcaacatgaaggaacaggaaaagaaatatccttcgaagacggaaatcaagaatctgcgtgtactgaagattattttcccgattgtagtgactacgattgtagctctcttcgtcccaagtgcagtacctttgatcggtatgctgatgttcggtaatctggtgaaagaaatcggaagcaatactttccgtctgttcgacgctgcttccaacagtatcatgaatgctgctactatcttcctcggactttcggtaggtgcaaccatgacggctgaagccttcttgaactggacgacaatcggtattgtcatcggtggtttccttgcatttgctctttctattaccggtggtatcttctttgtgaagttagtgaatctattctccaagaagaagattaatccgctgatcggagcgaccggactgagcgctgttccgatggcaagccgtgtggcgaatgagattgcgttgaaatacgatccgaagaatcatgtattgcagtattgtatggcaagtaacatctcaggggtaatcggctcggcagtagctgcgggtgtactgatctccttccttgcataataaaaagaacaaccaataaaaattaggcacggattacgcggataaacacggtttttagttactcaactcttaaaaccgtgaaatccgtgtcatccgtgcctaattttgtttttatctattcgctggtcaccttcttgtattcagccacagccatcttctctgccagataagcattgatcagattggtgtgtgcttgcgtccatgacaactgggcggaaagtacatctaccatgctcgcttttccttcattgtaggagaaagtggccagatccagattctcatttgccagactcatgttttctttcgctgttttcacctgagattctgtttccgtcagtttggtgagagctgccgacagttcttcgttgatattgtccgtcatataactctgttgcaacttttgtattccgatatatgccttctgctgtcggttcgtcttgaaacgggctccccagcggaaaatgggaatattcagattgactcctacgatgggattaaaagatacgtcgtatcccaagttgggtgtggccgttgcccagccaccgctgaaatacatgtttaattggggattgaactggctgagagccgctttacgttgtgcctggctcttcatgatgtttacttccgtactggcataatcggcacgtcgttgcaaaacatcttccagaggcagtatccggacaggagcggagatcattccgatgttgtacaggctgtctacaggagtattcggtgcttctcccatcagaatattcagctgttgcagcgctaatgtataattctggcgggctttgatatactgcagttccgcttctttcagccgggtggaaatcatcagaagatctgtacggctgatcattccgtcatcgaaacggtcctgaataatgtcatattgctgtttgacaatgctctggtatttgtcggctgcttgtagcatggcttttgaagcggaggcattccagtagacagcatcactttgatagtgaatctggtctaacgtgagttcctcgttcagctggttcagcttttcgtctgccttcgctatctgatgttgggcattgagcgcaccgcctgtgtagagtggctgtgatacgacaaatactccctggtaggtatggttgcggtattcgcccaccggttcgttccatgcgctaaggtcgctcatgttcagggtaccgtctgcatttacgtcgattttcggcaggaaacctgtatgggctatctttcgcgcctccgaactggccaatgtctttagtttttgttgtttcaatatctggctgtaagcctccactttttcgcggtaggcgtcctgactcaggcagggctgttgcgcccaggctgtggagccaaggagcaacagtgaaaatagtatgagttgggttttcatttctttcatggataatcttttaatggataatggatagttgataatggataattattgttctcctttgatccggtggatggcgcaataggctacaggaaggacgaatagtgtcaatgccgaggctactaacagtccgcccatgatggtggcggccattccgccgaacatggcgtcgaacagtagcggtaacatacccagaatcgttgttccggaggccatcgctaccggaatgatgcgactggtcgtggcactgatgactgcgtccagcggttttttgcctgctgctgtttccaaatcgatttggtctaccagtacgatagcgttcttgatgttcataccaatcagacctagcagacccaatatggagaagaagtcgaacgacttgccgagtacgagcagtcccagcacgataccgatgaagatcagcggcagcattaacaggatgacggtcggcttgcgatacgtcttgaacaagaagagcagcgtcacaaacatcaggaagaatgtcagcggtaagtttttggccagcgcttcattcgattccacctgactttcctgttcgccgaaatacttcatggtatatccttccggtatttttatctcttgctgtacttgcgaccatacctggttgaaagcggaaatcgcattggttccgcgacgcgggtcgcattgtgccatcatcaccatctgccggttatagtctttcacgttcgagaaccggtactggaagtcaaattcagatactacctgttccaggctggtcgtctcgttgcctgtcccgaatacgggcagtgtgcgcagatcattgatccggaatgaatccagctggttatttttcaataggataggaagtacctgatctccctgccggtattctcccaaagtcattcctgtggtaccgatctgaatgctctgtgccattccctgtcgggatacacccagcggttgtgcccgttccgggctgtaaaccggtttccagacgggtatcttgtttccccacgaattgcggatattaattaaatccggattctggtgcataatggctattgcctgattggtaagtgatacaagcgtatccacattcggaccgataaagccgatttcgatagccgcatccactgcgggggacagtttgaacaagctggtccgtgtgattgcactcggataattggctttcatatatccgtcaaaatcttcttcgtattctttcgtatatttactgtctgtcagttcgacgagtacattggcaaaattcggtttcggacctacggaagtggaggcaaggtaataccttagcggggtgctgccgaatgtgatggataccttttttacttctggctgcttcgccaggtgctcttctaccgatttcatctctttcactacgtcattgatgctgtatccgtccggatagaatacatccgcccggaaataaggcttatcgagcgacgggaagaagttctgcggcatcgttcccataataatgagcgagatgatgaagaggatcaccatggataccagtgtcactgctttcttgcggatcaatactccgagaacgaaagcgaacttatgatagaacggcttgtcgtatggatctttcgtgctgtcgcctgttttggctttcagaatgaaatttccgaatacggtagtctgcgtcagggcaagtacccagctcagtcctagtgaaatggcaagtaccacaaacagcggttttacgatttccgctacagcagagggagcaaggtaaagcggcaggaaggagcagatggcaatgaaagttgctccgagcaagccccattgtggtccggttgctccgtctatcagggctttccgtcggtttacacctcgggcaatggctatttgggcgttgtccgtcactacgatggcgttgtccaccagcatacccatggcgatgataaatcctgccaaggacgttctgttgagtccgacgccgaagaaagacatgatgagcagtgtacctccgatagagaaaatcagcgaagagccgatgagcagaccggcacggagtcccatcaccagcatgataatgacaatcacgatcaggatggattcgatcaggttgatgataaatccgttgttggcttcgttggcgatctcgttttcgaggtagaggctttgcagttccagtcccacaggcatgagggggaggagctcgttcagttttacttttacgttctcacccgtctgcactacatctctttgcgggtcggtggaaacaccgatgccgatagcccgtttcccgttcacatgcatgatgttggatggagggtcgagataacctttctcgatcacggctatgtcgcccagtttcacctgtccggctttggtggtgattacctggttgcggatatcgtctatgttggcatacattccgttggctgtcacccgtaactgctgtacgcctgcacggatttctccggtgttgataatctggttctgcgattgcagcaggttggccagctgtttgggatcgatccccattcccaccagtttgttggtagaaacgaagatgttgactacttccgtctgtacgccgaacagcgctactttcatcacgccgtctgctgtgacaacctgcgtcttgatccgttccgcccagttgcgcatttcctcataggtgaagccgtcatctgccgtcagtccataataaatgccgaatacgtcgccgaaatcatcggagacggtcggggtggaagcaccgctgggcagctgcggctgaatattgagcactttgcgtcgcagctcgtcccatttctgagggatggaactggcggaaagtgagggttgcagttcgaacgtgattttggagagcccgtacatggactctgattttatcttgtacacgccgctcatactttgtatctcacgggagataggctctgtgatcagccgttctacttctgccggttcggctcccggatagcgtgtcatgatgaccgctgatttgataacgaagggggcatcttctttcttgcccagctttccgaaggaggtaatacctccaatcagcagtacggcaaggaagaaatagatgatcttcgtgttatccagtgaatattttgctaaattcatttgtctattgatttaatactttctccttctaccaactggtatactcctgctatgacgatttgttctccgggtttcagtccttcggacacgagtacttgcgcctctcctgtgggggcattgacgacgattttgcgtttgtgcactttgttgtcctctactacccagacatacatgttgtttccgtcactttcgccgaaaacagcactgagcgggatgattgtccagctatcctgcaccaatgggcctacatcggctgtgaaacggatgctgcaagtgaagccgggcttcacggcatataagtcccggtcgaatgaagggtcgtcgatagtgatgctgaccggaatacccgttccttcggtggatatgtccagatattcctccagtcttgccttgaatacatggcccttgaaggtatcaaactctacaaggaaacggggatctttggcacggaggagataaagatatgcatccggtatggtgaacttgatacgcaggttctgtgtgttgaccagttgtacgatcccttctcctgaattgacacgctggtagttctccaccagccgcttctcgatagaaccgtcgaaaggggccgtcagtttggtgtcacgcatgttgttgctggacagttcgtactccgattttgctttctgataattggaaaggctgatttcatactcctgcacggagatcgcttgccgggagagcaggcgcttgttgcgttccacttgtgcggaagccgtttcgtaggcagacttggtggcagcatactgcaatgcgatatctctgggatcgatagctgcaatcagttgcccttttttcactttctctccttcgataacaggcaggctgatgatctgtccgctgacgcggaatgccagtttgacatactccactgcttctacaatgccggagaagtcttttctgattactgaccttgattcgacaatagttgtcttaacaggtcgggtggcgggtgccgtcatctcttttttttgcccgcagccttgaaataggatggctgcgagtgcaatcacatagatatttttcataagtcgttcattgtttgggaagtaaacaatttgatacttgactatgttcagtagagacgggtatattagaaatgtgaaattagtatcaacattaaaggaaaatgattgtttatagataaaaaatgccttttctgttgattttatcagagattattcccacttttgcaccgcactagtattacagtcgcggaatgcgatatgagaatttaattctcgaatttaagctacgagcatgtgggaatatgctcgtggcttccttagatatacggttctgtcccccgtgtggagcgttaatgcgcccactgtatctcatccctcgtggactgtaatatgtagtgcaacgggtcagcaggaccgtcttttttgcctgctgaatattattatatataataggaagtatttctcctgaatagtactatttaataaaccatcatttttcaggagatcagacaatataatggtatggtatattcccttaactataccatttttatattacctggtaatagttccccttagccagttaatatacggaccgcactactctgtgaagaatggtgcggtcctttagtttatctatgaaacgaaaaagaggaaatttccaaccggaaatctcctcttttttcatcttaacgaaagattgaattatttcttcttacggtcaccgtaacggctcatgaacttatcaacgcgacctgcagtatctaccaatgtagatttacctgtatagaacgggtgagaagtgttagagatttcaatcttcagcaacggataagtttcaccttcgaattcgatggtttctttagttgctacagttgatttagacaaaaacatatcaccatttgacatatctttgaatactaccggacggtatgattctggatgaaggccttttttcatttcagtatctgtttttttaatttatattctgttactattttggtaagaaatagtgtaatggtcattttcagagcgcaaagatagcacatttctccggaatagaaaaaactttgctgaaaaaacttctgtgaattatgctatttctatgaattatatgattggcacgaaaagaatgtcttgtgctttttatggtataatacctgttttgggatagaacctttcagccgtttatttgctaggtggacattacaatctaatgtcagacccgcttacggatgaatatttgctgatcgatttaaacctttttctattatatttttctttccgatgctcgttattcggtggataatgcttacttttgcgtagaattttaattcactaacaataaactttaaacaaaatggttaattacaaagacttaggattggtaaacacaagagacatgtttgctaaggctattaagggtggatacgctatcccagcattcaacttcaacaatatggaacagatgcaggctatcatcaaggctgcagtagaaacaaaatctccggtgattcttcaggtttctaaaggtgctcgtcagtatgctaacgctactttgttgcgttacatggctcagggtgctgtagagtacgcaaaagaattaggttgcgcacatcctgaaatcgttcttcaccttgaccacggagatacttttgaaacttgcaaatcttgcatcgattcaggtttctcttcagttatgatcgacggttctcatcttccttacgaagaaaatgttgctttgactaagaaggtggttgaatacgctcatcagttcgacgtaacagttgaaggtgaacttggtgtattggcaggtgtagaagatgaagtttcttctgaccaccacacatacactgaccctgaagaagtaatcgatttcgctactcgtacaggttgtgactcattggctatctctatcggtacttctcacggtgcttataagtttactccggaacagtgccacatcgatccggctaccggtcgtatggttcctcctccattggctttcgaagtattggatgctgtaatggaaaaacttccgggattccctatcgtacttcacggatcatcttcagttcctgaagaagaagttgaaacaatcaacaagtttggtggtgctctgaaagctgctatcggtattcctgaagaagaattgcgtaaagctgccaagtctgctgtttgcaaaatcaacatcgactcagactctcgtctggctatgactgctgctatccgtaagactttcgctgaaaaaccagctgaattcgacccacgtaagtatcttggtccggctcgtgacaacatggaaaaactgtacaagcacaaaatccttaacgtgctgggttcagacaacaaattggctgaataatcacagattatcctattatatagaaaggctgcaatcgtttgacggttgcagccttttttacgtaatatcctttatctgcttattccggtttctgagcgggcacatttcctcccaagaagaaatcttctatcttttgcttactttgaatgtctttcagccagttggctgcagcattataataattcttagtgcctaaaacgagttcgcctcgttcgtttagtttcgcttcttcttccttatcttctttcgggcgtgtttttaagaatgcttccagacagcgttcggtatttttcttgtctttcagcgaatagaaataaatgaaagccatatcatagagcagtttatgattttgtttatcgtatttccggtagcgttctctgatcgattcaatctgctctttaggcatctgtgccattttgtagcagtcggtcatgccaatatagagccgtaccatattactgtctttgggaatagtcagatcaagcgctttttcgagatactctacgcctaacttcttccatgaagtcttggcgcaggcacggccgagataataaagcaggtttacgttttcaggatcatgttttcgggcggcttccagaaagtcatgtgcttcgtaatatttctcttctgcataatagctgatacccagataataacaggtatgaaaagaactgtcgccctggctcaccaggtattcataacgctggatagcggtaggataatccttattcagacaatatgccagtgcattctgacggttgacagcgatattggtggtatcaatctgccgatatttctccgtggcttcaattgcttcgttgaaataagaaccggctatgttcagtgcggcgagcttggcggcggcaagatagtcgtcggggtatttctcttgtatattatagtagcaccccgtggcggggagaagctctcccataccttcgaaactttgggcctgcagatgcaaggcgatggcggaactgtctttctctgtcatcagactactttctcctaaagcatcctgaaacttctgtaaagagagcagtagtccgatgtattgaatacgcacatatttgttttccggattcagatcaagtgcctgttcataatatttcagtgcctgttggtatttggccaatgaacggcagcattcggctgcttcgatatatgcacgggtattggcagtgtcattggttatgatttcctgataagtggaaagtgcttctgtattcatcccaagtccccgttgtgctttacctttttgcaagagtaggggaattgtcggcttttctttggcaatgagagtgagagctgcctcgtaatcgtagtttgctattgcttcctgaacatgattgatgcgctgcgccatcaccagggtggtggtacaaaggaaggcgaggagaataatccgtttcataaatatttattttagtgtgtcgtaacaaagacgcaagatgctaaaaaatatcgtatttacgaattattcgtagcctttttggaatagattaacggaatgataagagaagataacataatgataagtgcggatattgcatctaaaacagcaatatccgcacctaatattttgtcccggcattccgaatggaaacctgacaggggcaccttgtccctacattaagaatcctaacaggataccggcagcaacagccgaaccgattacacctgctacgttcggacccatagcgtgcatcagcaagtagttggtaggatcatattccagaccgacaacttgtgagatacgtgcagagtcgggaacggcagatacacctgcattaccgatcaacggattgatcttattgcccttcttgaggaagaggttgaagatcttaacgaagatcacacctgatgcggtagcaatgataaatgacagagcaccgagggcgaagatcttgatggagtcgagtgtcaggaactcagaagcctgagtagaagcacctacggtcaaacctaacaggatagtgattgtgtcaatcagcggaccgctggctgtgttagccagacgacgggttacaccactttctttcaacaggttaccgaagaacagcatacccaacagaggcagaccggaaggaaccaggaagcaggtcagcaacagaccgataatcgggaaaatcactttctctgtatgagaaacggcacgtggcggtttcatacggataacgcgttcgtgtttggtggtgagcagacgcatgataggcggctgtatcaccggaactaacgccatataggagtaggcggataccgcaatggctcccattaagttaggtgccagcttggacgaaaggaagatagccgtcggaccatctgctccaccgatgataccgatagcaccggcctgcatcgggtcaaatcccatttccaatgcgatcatgtatgcaccgaagataccaaactgggcagccgcaccgatcagcatcagcttcggattggagattagcgccgagaagtctgtcatggcaccgatacctaagaagatgagcggtggataccagccggacgttactccctgatacaatatgttcaatacagaaccttcttcatatataccgacttttagtccggcgtccatattgaaaggtatattaccgatcagaataccgaatccgataggaattaacaacatcggctcgaactctttggctacagctaagtaaataaagcctaaaccgataatgatcatagcaatatgtccacctgtcgcgttggcaaatcccgtgtaggtccagaaatcggcaaggttatttcctaaaaagttaataaaatctcccatattattcaataattacgaggtcattaccttcaagaacagaatctcccttgttgacattgatggcagtcactttaccgtctttgtctgcattgatattgttttccatcttcatggcttccaatataatgatagtctgtcctcttttcactgtatcacctacatttactttgatgtcaaggataacgcctggcagtggggacttaacgcctgatttgccggtagaaggagcagccggttttactaccggtgtggtaggagcagccggtgagttaggcatagggcgtactactgccggtttgggagtagctttcggttgtttctccatttctactttgtaatgcgtaccgttcacttctacatgagcgatattatcttcaatatctccgatggttactttgtatgagttaccgttgattttatatttatattctttcatcgttttatctttttagggaatgatttactttctgttaggattttcacgcaaggtgtaaatcttcgaactccacggtgaataactgcgcttcacacgagtgatggtcagcaccgtttcttctacgtcgtgtacctcatcctgcatttcgtgtaatgccattgaaatagcagcataaacttcacccggagcctgtgaaagctctttcgcttcgactttatcgatgcctttagccttcatcgcattgcgtttgctcaggttgacagcaactttacctaccaccttgaaggcaatgaagagaagaatcaatccgcagaatactacgctcatggctgaaatagacataccgataccgactgagtcatgttcttcgaacttttccatcttggcattactgtcaagggttttgttgttcgtgctcggggttacgtatttgtctttgcttccgccttttacttcccagtctgctgctccgtcgcttatgcgtgcataagactggttgggacctaaagttcctgctggtatgacaacttgatcaagtagctttctgcctgaatcaaaaagaccgacccaattggctgtttcgggattcagtttgaagctggtatggaaggttccacgattaggttcgccatctgcccaaaataacgcatgttggcgtggctttactaatgtaagtatgtcaccttttgggataaaataggttactgtatcgcccggctggctgcttactttcaataaacaagctgctaagtctgcgctaccgtatgatttgttgaatatttcaatccatgcactgtgcaagccgtagtcatcctgaaagttgttttgattgtctatcaggacttcattcagcaatagcttattgttcgacttttgctctccgcaggaagtcaatccaatcagcaacagcagagaaaggaatattccgattttggttttgttcataatcgttcttgttttaatgtgaaaagttggattacaacggaatattaccatgtttcttcgccggattagacagtttcttagtctgcaactgctgcaaagcacggatcacgcggaaacgtgtgttacggggttcgatgacatcatcgatgtaaccatacttagctgcattataagggttggcaaacagttttgtatattctgcttctttttcggcaaggaactgagccggattttcctggtctttggcttcacgcgcgtacaatacttctactgcacctgcaccacccattacagcgatttcagctgttggccaagcatagttcatgtcaccacgaagttgtttacaactcatcacgatgtgagaaccaccgtaagatttacgcaatgtgattgttactttaggtacagtagcttcaccgtaagcatacagcagtttggcaccatgaaggataacgccattgtattcctggcctgttcccggaaggaatcccggtacgtctaccaacgacacgatagggatattgaaagcatcgcagaaacgaacgaaacgtgcgcctttgcgagatgcgttgctgtcgagtacaccggcaaggaatttaggctgattggctacaatacctacagactgaccgttgaaacgggcaaaaccgataatgatattcttggcatagtctttctggatttccaggaattcgccgttgtctacgatagcgctgataacctcgtacatatcatacggtttgttggggctgtcggggataatatcgttcagtgaatcttccagacggtcgatcggatctgtgcaatccacgtatggagcttcttcgaggttgttttgaggaatatagctcagaagtgtgcggatcaatgccagaccttcttcttctgttttggcagtgaaatgagtaacacccgatttggtagagtgaacgcttgctccgccgaggttttcctggcttacgtcttcaccggttacagttttcacaactttcggacctgtaaggaacatataagaagtaccttccatcatcagtgtgaagtctgtcagtgccggagaataaacagcaccgccggcacaaggaccgaagataccggaaatctgcggaatgacacccgaagcgaggatattgcgctggaagatttctgcgtaacctgccaaagcgttaataccttcctggatacgtgcaccgcccgagtcattgataccgatacaaggagcacccatcttcattgcctgatccataatcttacagatcttcagtgacattgtttccgacagtgaacctgcagtaacggtaaagtcctgtgcaaaaagatatacgagacgaccttcgatagtaccgcaaccggttactacaccatcacccggatagtgctttttctccatgccgaagttcgtgcatctgtgctcaacgaacatgtccatttcttcgaagctaccttcatccaacagcatggctatacgctcacgcgctgtgtatttccctttttcatgttgcttcgcaattgctttttcgccgcctccgatgcgtgcaacggcacggcgttcaataagctctttaattttttcaagttgattactcatgagttcttgttgtttttttagagtttatgattagtgttcgcagagttctgtcagcacacccagtgttgatttcgggtgaaggaaagcgatgttcagaccttcggcacctttgcggggagccttgtcaatcagacggatttctttgctttctgcttctgccaaagcattagctacgccatcttctacggcaaatgctacgtgatgaacacctgcacctttgttttcaataaatttagcaatggtgctttcggggcaagtcggctccaacaattcgatttttgtttcacctacctttaaaaaagcggttcttactttttgatcttctactgtttcgatgttgtaacatttcagacccaatacgttttcgtagtaaggaagggcttcttcgatgctttttacagcaatgcccagatgctcaatgtgtgaaatcttcataactatatttttttatatggtttaattatgtgcttatatggcataaaacagcacaaagaaagacatttcttgtctaataaagaaatatttctgcatttaattattggggaataaagcataaaaaatgctccggatgggtgacaaagacgggttttgtaatcttgagattacatttagacataaaacttgaccagaagattattcagccatggccagctgatacggaaccagcggcgggtactgctttgtttgcctccgaaacggagtacgaaatcacgataaccatgcttgcggaagggaggtcctacatccatgaactccatgtgacggaatccccgttcatgggcatcttcaagtgctttccatactgccagtatgccgggtgactgcagtgcataggtctttcgcattcctcctgaaaaccagataaaagcattttcgccggaatagatgcagacggagccgccgataatcttttccttgtattttacgatgaatatttttgcctgttttcctctgataagcatgctgttcatgtggcggaaaaagtcattggcagggaaatatctccgtattcgtgaagaataaactttgtgcagcatccgcgagaattccttaatctcttccaccgtatgggcttctactactttggctccgtttttgagtcctttccggatctgacggatacgtgacgggctgaaacggtcttccgctttctgcgtactatgcagagagttacggacacgcagccagttgactggaaaaaagtcgttctttcggaagaaacggtaaccgaacatggaattatccagattgcggaattcaataagaatgcaggtgcgtgatgcttcttgtgtgagatgctccagcatttcaccgaaaatttcttcctccttctctttacttgccggtagagaagtgtccagaaattcacctgcaccatataccacacattgtttgacaagagaggagggaagccactttttggtcttgcgtatggcggcaagcaggcgtgctacaggtctgccttcttctgttgccactatcagtagcggggtatatccgggagtcgattcatagatctgaaacaactccttggaatgaaaagtattggttcccggtaaatcaggaatgtcttttccgcgataatatgttgttagtttaagtggcatccaaatacaaatttacactttttattcttcattcaacaataaaaaagagaatttgttggcttagcctaaaatttgtctttttatcctttgcatatatttgaggaaaaaaaggcttgaaaaagcgaatttttgtattattgtcgtcctttgtgagtacagaagtaaaatggaaacgtctatgtaaaagattatgctaattgtattttactaaacaaaggaaaattaatattaactttaaattaaaacgaatgagagagaatgcatttgttgaagcgtggaagacacagcatagacgcgtttccatgattttagggctgactttattgtgtgccccttctgccatatctgtttatgcagaaaatggtgtgaatgatattactgtgcaagccgtcatgcagacaaagacagtgaaaggaactgttttagatgaaaatggagaaccgttgatcggtgtctctattgtggtgaaaggtacaagtacaggtacgataactgattttgacggtaagttctccattaatcttccgggcggaagtaaagaactggttgtttcttatatcggatataaagaacaggctatcattgtgagcggaaatgccccgctgaatataaagatggttccggatacacaggctttggatgaggtagtggtcatcggttacggtacggtaaagaaacgtgatttgacaggtgcggttgcttctgtgaaatcagaggatatcaccatgaatccgggcgtgaatccgatggatgcgctgcaaggtaaaattgcaggtctggatatcactaattcttcaggtcaggcaggttcgtcaccgacagttcagttgcgtggtacccgctctttgcagttggatgaggatggtaatatttcttccgatgcatttaagccgacttatattatcgatggtatgccgggtgatattgctaccttgaatcccaatgatattgaatctatcgaagtactgaaagatgcatcttctacggctatctacggttcaagtggtgcgaatggtgttattatcgtgactacgaaaggatccaagagtggaaaaccggtcatcaattttaatgcttatgccggaacgactatgggtgcccgagttcctaagatgcgtacgggtgactcatacattaattatataaaagattcttataagcctgtcggtactactaatgaggaggaaattttcggtgaaagatacgacgccatcaaaaacaaccaatgggtaaattggggagatgaagtattacattcaggcttgaagcagaactatagtatttccgttgccggaggtactgagaagacgaaagcttatttctcgttgaactatactgatgagaagagtatgtatgagaatgatgactataaagtgtactctacccgtgtccgtatagatcaggaaatcaataaatggatgaatgccggtattaatgttcaggcatctttctccaacaagaattcacgtaatgccgttttagaaagagcattgtttgctaccccattgggtgttccttataatgaagatggctctattacggaatttccgattcccggttcatcatcagatccaaatccgttagcagacgaacaagatggagtatataagaataatactaaagcaggaagggcttatgttgacgcttatcttgaatggaaaccggtaaaaggattgtctgtcaagtcacagcttggaggcagttattctcaatctcgtgccggtaaatttatgggagaaggctcttataatgtgttgaaaggcagtacggtggcatatggcgaagctaccaataagacgggatataattacaaatgggaaaacatagtaacttatcacaatacatttaataaggatcatgacctgacggttacaggggttacttcctggaattacaatcagagtgaagaatattatgtctatggtgaaaacccggcgaccaatgatatgttgtggtatgcattgcagaatgctgataataagaaactgaacagcaaatatctgatgtcgaaagggatgggctttatcggtcgtgtcaactactcatacaaaggtaaatacctgttctctgcttccagtcgttatgaagcggattcccgtttgtcgaaagacaatagatggaatttattcccggcagtttctgtaggctggagaatctcggatgaagcatttatggctggtacaaaaagctggttggataacttgaaactgcgtgtaggctatggtgttgccggaactactgccggtattgctgaatacagttctatggcatctttggaaaatgtgacaacttctttgggaggaatgactgttccgtcagccaagtttacggagtatatcactaaccgtaatctgacatgggaaaagactcatgacttgaatattggtattgacgccagcttcctcaataatcgtattgatctgacggtggatttgtatcggacaaaaacaacggatgtaattctttcgcaggcattgccgacatctattatgggtaattacacaggtagcactacttataaaatgaacaagaatgctgctgaaacagaaaatcgcggtattgaacttgctcttaatacccgtaatattgtgaagaaagattttacttggagctcaacagtgacatttaccgccaacaaagaaaaaattaaatctttgatcgaagggcaggatatgatgttcaatgcaaaaaagggtgatatggtgttcaaagtcggcgaaggagtcggttctttctatagatataaagtgttgggtatctggcaatatagcgaaaaggaaactgctgctttgttcggatgcgaaccgggcgatattaagctggatttacctagtgtgaagaaggacggaaatggttactattatatgaatcctgaaggagagcgcgttgatattacggcagaaaatccttatggtgtacgtgcggattatgatcgtcaggtaataggtcgtaatactccggactggacattgggctttaagaataatttcagatacaaagattttgatttgtctgtcttcctttatgcacgttgggggcaaatgatgaactatggtagtgtgataggtaaatattcgcctaacccggattacaatattcctacttattttacttactatgacaagacgatcgaagcagatcagaatgtcttgttctatgctatcgataaatccaaggatagaagtgcttatgaaggatatgattcgatgtattatgtggatggatcattctttaaacttaaaaacgtaacattgggttatacgttacccggtaaacttacaaaacgttttggtatcagtaatctgagagtttatgcgacaatgaccaacctgtttacttattcgccaaacaaatatgtgaagaattacgatccggaaatgaacggaagcatcaacttcccattgtctcgtgattgcatatttggtcttaatttaactttctaaaaaatagcaatatgaaaaagatatatagtttagttctacttgttgccggtgttttttcttggggctcttgcagtcttgatgaagtgaaccccaacaactcgggtcagttctccgatggttcttatacattggaaacttataaggcattcaccaactcgtgctatacagccttgatcaacaacatctatcagagtagtgactatctggtttgtacggaagcgggtactgatatttgggaagaacctaaatcgggctccagctatcagcgttatcatagttataacggtatgaaaaccgatgatagctattattataaagtgtggcaatattcttatctgtgtatcaacagctgtaatattgtgattgacggagctgagaatgtgacaggggatgagaatgaaatcaatgaatgtgtggcacaggccagatgtctgcgtgcttactattatatgaatctggtggagcagtttggaaatgtcgatttgcagttgaaggctgccgatagcgagaatatttcttttgatgctcaccgttctaccgttcccgaaatttatgctgccattatcgaagacctgaagtttgccgtagagaatctgcccgtaagtttcagtgattactatagccgcgttacaaagaaatcggcgatgggattattggcacgtgcatatattaatggtgccggttatgatctgaaagatatcgatggtgtcagctttctggaaaaagcctatgatacggcgacaaccatgattaataataaagcgatttatgagtggtatatgcatcctgcttttgccgatgtattcaacgaaaataataatcgtaacaatgaagaagctctgttcattgctgcgggtgccgaaagaaattcggacgcttacaccaatggtaactactcacaaagtgaaatgttccgtcacttcttaccttcgttgggaacatatacggacctgggtttggtagacaagacttcaaacttcgtttacggtcgtccgaacagtaatatcttcctgccatccaaatatctgatggactgttttgctgctgatatgaacgactctcgttttcgttattcatttatctcagcttactcgtcttattcaataccggcatggggggcgacttatgaatatggaggttcagcgtgtgccaaagaaatcacaagcacacttgctactaaatttggtattcccgcatctaatataggtaagaaagtttatcctcattttaacttggaatccaatagtacagccgatgctaattactgccagctggctatctggaatgcagatggaacagcgaagactactcaggataaaacagatggtaatattcttcatcctgctatgcctttagatccggcagaagctcatcaatatgccgtttattgttctttgaagacgctgacagaagaggaaaaagctcaatatccggggttggttcttaatgttttcgatctttacgatgagaatggaacagccagggctacctatgacaagcctagtgctgccagtgctttgtggttatctatttatccggctctttctaaattcaatatgccgggtaataagtttgtcggcagagacgttcagagaaaaactgtggatgtgatgatcatgcgtatggcggaagtttacctgattgctgctgaagcatcggtacgcttgaacaagggagatgctgccaaatatattaatgtactccgtacgcgtgccggtgccggtacggtcagtgagtcgcaagtggatctgaattatattttcgatgaatatgcccgtgaactttgtggcgaatgtggccgctggtatttgctgaaacgtaatgctgcttttgagactcgtttggctgcttataataagcgtgctgccgagcactttaagaaagaattctatttgcgtcctattcctacgaaatatctggatgcgatcaataatccggcagaattcggacaaaacgccggttattaatcagttaattaataatcaagcataattaataggagccgggcaggagatttctcttgtccggctctttgtttccatacctgtatcctgcgtaaaagtttaaaaaggatttccggtatattttcattgtttcctgatacagctttttattattttctttatttttgtgtgtccaaacaaaatagcgctatgatagaagaaatgcttgcttataacagagagttcgttaagaacgagggatataaagaatatataacgaataagtatcccgataaaaagattgctatcttatcctgtatggatacacgtctgacagctttactcccggccgcactaggcattaagaacggagacgttaaaatgatcaagaatgcaggaggcgtcatttcccatcctttcggtagtgtgattcgcagtctgcttgtcgctatcttcgagttaggtgtggaggaaataatggtgattgcccattctgattgtggagcctgccatatgcacagtgaagaaatgcttgagaagatgaaggcacggggtattaatgccgattatattcatatgatgagtttttgtggagtcgattttcattcttggctagatggctttgaagatacggagaagtcggtaaggggaacggtcgattttatagttcatcatcctttgattccgtcggacgtgaaagtgcacgggtttatcatagactccactactggagaactgacgcgaattgtataggaaatcgccctttctgcctatcaggaactgcataaaacatggtgtcactatcgcaacaggatagtgtcactatcactgtctcatggtgtcactatgtcattgggataccgacactatcccaaatgaaaaaaataaggcagctttttatcggctgcctttatctttctacggttatatactttctttgactcatgcactcgtttgtaacaaacggggtgtccgtgctctttgatttctgcctcacggctggctttacgattcgctttgatgtaatcgtcttgtgtaattcgttttttcataatgaatatatttctcagtgcaaagatacaatttcatttcttattacgatcggtttgcgctatctttgcatacataaatcaaatgaaaacggaaataatatggaaaatttcagtgaactgataaagaatcgccgcagtatgcgcaaatttacggatgaggagttaacacaggatgaggttgtggcactgatgaaagctgccttaatgtctcccagttccaaacgtagtaatagctggcagtttgtggtagtcgatgataaagaaaagttgaaagaactgtctcactgcaaagaacaggcttcttctttcattgcagacgctgctttggcgattgtcgtgatggcagatccattggcgagcgatgtctggattgaagatgcttctattgcttccatcatgatacagttgcaggcggaagatttggggctgggaagctgttgggtacaggttcgcgaacgtttcactgcaaccggaatgccgtctgacgagtttgttcatggaattttggatattcctttgcaactgcagattctttccgtgattgccattggacataagggaatggaacgtaagcctttcaacgaagaacacctccagtgggagaaaattcatattaataagttcggaggaaaataacgatgggagctgtcaaagcaaataataataaagatacttataaggctactgccgtcgcttttattgtcatcggaactcttttcctgataaataaactgctcccctttgcttctataggtttgccttgggtgatgaataaggacaatttgttgttgtatgcctctatcagttttcttattttcaagcgtgacaagtcggtcggctttgtgctgttgggactgtggctggtaatgaatatcggtctggtaatgtcattgctcggttccttgtccggttatctgttgccattggcactgttgatcatcggaattattttattttgggtttcaaaacgttaaagaaacaatgaaaagaagtattgaagatacgcccgttgtgtttctcggtgccggaaatctggcaactaatctggcgaaagcgctttaccggaaaggattccgtatcatgcaggtgtacagccgaacggaagaatcggctcgtacgttagccaatgaagtggaagcggaatatatcactgatttaaaaggcgtatcgaatgaagcgagattatatattatttcattgaaagatgccgctttcgtcgaactgttgcctcagatcactgatgggaagcagcatgcgctgctggtacatacggcaggtagcatcccgatgaatatttgggaaggtcatgcggaacgctacggagtattttatccgatgcagacgttcagcaaacaacgtgaagttgattttcgggaagtacctttctttattgaggcaaaaagaccggaagatgccgagctgctgaaagcggttgccggtacgctctctgataaggtgtacgaagccgattcggagcaacgcagaagtcttcatctggcagctgtctttacctgtaactttaccaaccatatgtatgctcttgccgccgaattgctggaaaaatatcatttgccatttgatgtcatgcttcccctgattgacgaaacggcacgcaaagtgcatgaactcgctcctcgtgatgcgcagaccggaccggctgtacgctatgacgagaatgtgatgaataagcatctttctatgctggcagacagtcaggcattgcaggaaatttataaattaatgagtaaaagtatccatgagcaccatcaattatgatctatcccgcatcaaagcactggcttttgatgttgacggagtattgagttcgacaacagtcccgttgcatccttccggagaaccgatgcgtacagtgaatatcaaagacggttatgccattcagctggcggtaaagaaaggacttcatattgctatcattaccggtggacggacagaagcggtacgtatccggtttgcagcattgggtgtgaaggatctgtatatgggttctgcggtgaaaattcatgattaccgtgatttccgtgataaatacggtctgtctgatgacgaaattctgtatatgggcgatgatgtgcctgatatagaagtgatgcgtgagtgcgggttgccttgttgtcccaaagatgcagttccggaagttaagtcggttgcaaagtatatatcttatgtcgatggcggtcgtggctgtggacgtgatgtggtggaacaagtattgaaagctcatggcaagtggatggcggaagatgctttcggctggtgagttgtaaatcactaaatgataaataaaactatgcttggaaatttagataaatatcagattatattagcctccaattctccccgccggaaagaactgatgtcaggcttgggagtggattatgtggtcaggacattgccggatgtggatgaatcatatccagccgatctggctggtgctgcgattccggaatatatctcccgcgaaaaggcggatgcttaccggagtattatgcaaccgggggaactgttgattacggcagatacgattgtctggctcgatggtaaagtgcttggaaaaccggaaggtcgagaaggggcggttgaaatgctccgttctttgtccggtaagtcacatcaggtgttcaccggtgtttgtcttacgactactgaatggcaaaagagctttactgctgcatccgatgtggaatttgatgttttgtccgaagaggaaatccggtattatgtggacaaatatcagcctatggataaagcgggagcgtatggagtgcaggaatggatcggatatataggggtaaagtctatttcgggcagcttttataatataatgggactccccatacagaaactgtacggggagctgaagaagttataataaatccagcattaacgggatgtcctcttcttgaataccttgtttgagaagagcttccttgtctttccgaaacatctccagaaagcgttcacggtttccgttggctgtgattgacttgccgtacagggcggccgctttctgaatgtctcccattgtccatgcgacgtgtccggcattcatatagtcgatagccagtggcttctgttcaatgattttttcgtaatatttcatggcttgttcgtatttccggctgatgaatgaacaccacccgatgccgcgccatgcttttatgcaattactttcgatgaaatccagtttgaaaaagtagttggcagcttcttcgtattgtccgagttcggccaggcaactgccgatatggaaaataacattggtatcttccggtgtagcttcttccacctttttataatagctcaatgcagcctgataatttcggtttaaccggtaacagatagccagatggcggttgttccagatgttatccggtttcagtgtatccgctttcagataagcatcgatcgcttctgcatacttcttgtttttttgcagagcatatcccagtttctgataatattctgcacctcttccctgaagtgctccgatcgtttccatttcctcgtacacttctattgcctcattccagcgttctttctttaaatagaaatctgcgatcgggaataggatatcttcactatataatacgttactaagtgcaggaatgtggtgtaaatcgagtttctccttaaagatgtccctaaactcgtggcggcgtacactgagcttgaagaaacggtacaggtcatgcagatattgattgctgacggttcccggtcgctcattgaatttcttcattgtttccgcactcgacttttcggacagctctgccacttgctgttcaccgagctggcttagcatcatgtcttgctgtgcctttggcaactgccggatcgtaaagaagagtgaatacttatcactgttactgaaaaatcctgattgaagaattaaatccagcaatgtatttttctcgttaccttcctgtttcagttgcttgatgacatcggattgctgcttgctgaacgggtaaaaccaattctgtacttcccggaagaacggataacttttcagtgctgcaaatgtactcatatatacgtcggctccttccagttgcagctcattcatttcgcgcaacttgtctcccagtcctgattgttcgaaagcgtccgcccaatccggattcttgtcatcgttctcatcctcattctcctcaaagccgaatctcatgttccgcatggacgaaacattcttcaacatttcaggaataatttcctctctcattttcttgtctatcttttctgtttcctggcatagtagcatttggcgatagatacgtgccacatcctctttgaatggaggaatctcatccatgaggtcgactctcttgaccagatcgttgtagagtgagagacggttcctgtagatatggaaaatgaaaatgacacctaccagtgcacgttgaccggcattgacatccggatggcggtaagcatccagcaaccacatgattttacgcaggtcaaaacattccatcagacttaatgtgacagcactgataaacaggcacagatcattcaccggaagaagttcggaggtaagcatggattgtgcatcctcttcctcttcgggagtccatgcactgttggtccatgtttgcagaaacatatatttaagtgtttcttcatgccgtttcagtacctcgtccatcttttcgtcagacagcagtccactgactgccaagtcgtcattgaatgactccagcatgtgcagcaattttttgagtgtatatgctgagagactttccggtcggggagtgcggcgtacctcatgataatatcttgatgaagcattgtccagcataagcaggcgcgaacggtcggctatttcccaggtatcagctacgagttttctgtatacattccagcgttctgggtcgtttgcgccttggcgcatatactccagcatatacttgtaggaggtttgcagctgctccaagcgggtacgtaaatcccagtccggacattgccaaagcagggattccaactgcatcaaagcttctttaagtcttttttcttcaagcagagagcgtatataggtgtattgttcattaatcgttttttcattcataatggttcaattatttataggtaatagaacaaaaaggatgccaaaaagttagaatctgacttgcacctgtgcttgtatcagattagaatccttttgtccgtctccttttttatcacaaaaagtgtattgtgcctgcacacggcatctgggataaaaccagtattgcagtccggcaatgtaattattttgtttgaaatctgccgctttgttcggattgaaataatcgaaagaggcgataaagtcgaaattttgtaataaacgtacgctgcctgtcgcatagaatccttcgctttttacgtttctgtcttttcctgcaagatattccgtacggaagttgaatgcggaagtggtaacaacccctcccaggctccagcgtttcttggcgtaattttctcctgttttgattcccgaatattgggagtcacctatggcgtgtccggttccccgaatgaaagatcctcctacagacagccatttgttaggatacaccatcaggttgccgactacatctttctgactgtttttgtctttggtgtttaatccctgtccgttcatgacggcaaatttgtattgcaggagatcatgaaatagttttccgtgaatcatcataccgatgtctcgtccggaagtcattccataacatttgtcactgccgctgactcctgccagataacagactgactgagaatagcagttgatcagctctaccgttgtgggagacagttcgttttcaatggtgtaaggaactttaaattctccgatacgtgctgtaagtccggagaggatccggtagtctgtatatacttcgagcagcataccaccgttgtagaaatcatacatgaaatcgcatgtccatctgtcggtgattttaccgtgtgccatgaagatgatccgtttgatgtcgaatgtattgtcgggattggcggcatcgtcgtatgtataccccagttgtgcataaccggcaagactgattcgttctttcagtgtattgactacttgattcaacggcgttttctcctgtgcggtgagcgtattctgcatactaagcagggtgaacgcgatcattgagagtcgaaagagtgtttttcgcatgtgattagttgttatttgattgttgttgaatttgtttttgtaaaagttgtatctatcagatttttgtatccggaatatgtctgagatatccggttatttgttttcagccatgttactgctttatccagggcatcggctgaggggcgctccgcttttctgtaaacagggagtgcaatgaggccggtcaggttttccggaacgccgatatctatcaatacctgtttccattctttttgcgggtgcatttttatatagtctattcccagattatatccggtgattaatagttcgatttctcttcttttttcgttgatggcttctcgggagaaagcggtgacagtgaaatcaattcccaattcctgtgtgctgatcagagaccggtgacgggcattcattgcgatggatgcggcagggtcggggaggaaggatgcgtcaatctgatcgtattgcagcatttgcaggcgaagagggagctgggcgatttccggtttgttcacttctgcctgactgattcccgctttgttcagtagctgtccggttgcatactcgataatcgtattatgtgaaacagctatatttttttctttgagttcctgaagttggttgataccgctttctttggagactataaaacagaaataaccgtcatgtttcaaaatgattcctaagtcggtatggtggatagcctgtagagttactgcactgggatagtcggtgatcatgccatccattgatttgaactggaacgctgcgtcgcggtcataggcggaattgaaagaaaggatggttaaatccaatcccagcgaatcgtagattccttgtgctttagctatgtgaaaaggcagtccgtccagagtcgggagcattcccagtgtgagtggttgtaattctgttgaaggtataaagacgctttctcctttttttctttggcaagaataaaggaagaaaaggaggatacagaatatgagtgctgctctcttcatgccttagttgatgggtcagatataaataagggcaactcttttcacaaagaactgccctcgtatctaaaattacattgttataaattcattattcattaatggcagcgatacccggaagaacttttccttcgattgcttcgagcaatgcgccaccacctgtagaaacataagatacgccgctagccagaccgaacttgttgacacaagctacagagtcgccaccacccacaagtgagaatgcaccgttcttggttgcttcaacgatagcttcacctactgtacgtgaaccgtgagtgaagttttcaaattcgaatacacctgtaggaccgttccaaagaatagttttggattctttgattacgttagcgaagatttcttcagtcttaggaccgatgtcaagaccttcccatccgtcaggaatttcatcaacagcgcagaactgagtgttagcgtcgttagagaaagcgtcagcgatcttagcgtcaacagccagtacaaggtttacacccttttcttttgctttcttgatcagatccaaagccaggtcaagtttgtcgtcctcacagatagagataccgattttaccacccattgctttggtgaatgtataagtcataccacctgcgatgatcaggttgtctaccttattcaacaggttttcgatgatttcgattttagaagaaactttagaaccacccatgatagcagtgaacggacgttggatgtcgttcaatactttatcaacagcttttacttctttctccatcaggtaaccgaacatcttgttgtcagtgtcgaagtatttagcgatcagagctgtagaagcgtgtgcacggtgagctgtaccgaatgcgtcgtttacgtagcagtcagcgtaagaagccaatttcttggtgaattctttctggctttctttgacagccttctttgcagcagccttttcttcgtctgtggcatcttcagccaaacctcttggtttgccttcttcctcagcatagaagcgaaggttttcgagcaacagaacttctcccggttgcagagcagcagcttttacagcggcttcttcgcccatgcagtcgttagcaaactgaacttcaacgcccagcagttcagacagatgtttgatgatatgtttcaaagagaatttgtcggcaacgcctttcggacggcccaggtgagaaccgatgatgatgctaccgccgtcagccaaaatcttcttcaaagtaggaagagctgcacgcatacgagtgtcatctgtaatgttgaagttttcgtccaggggtacattgaagtccacgcgaacaaatgcctttttaccggcaaaattgaatttgtcaattgtctgcataatactctatttttatttaaaagtgtttttaatattctcttttttgatcgaccgcaaagttactatttatttcggttccttgctattaaatcgttatttattcttggcttttggtgcctcttttgtaactttataagtgttacagaaatatttgcacatcatttgcaaaccgcaggtgtcacatttcggcgtacgtgcctgacaaacataacgaccatgcagaataagccagtgatgggctatgggtattaatttttccggaatgttcttcaccagttctttctctacgctgaatggagtcgtacaactgtccggcaccagtccgatgcggtgactgacacggaaaacgtgggtatcaaccgccatcgctgctttgttgaaaacgacggactgaatcacattggcggtctttcttcctacaccgggaagtttgatcaggtcatccatgttgtcgggcactttgctgttgaagtcattaaccagcattttagccattcctaccagatgtttggctttgttattcggataagatacgctccggatgtattcgaaaataacttcaggcgtactggcagcaagagcttccggagtcgggaagtccttgtagagaggcggagtgatcatatttactcgtttatccgtacattgtgcagaaaggattacagcgatcagtaattcatacggattattgtaatgtaattctgtttcggctacaggaacatttgcctgaaaccatgcgattactttttcataacgttctttctttctcatcttaacttgtttttatggtagtgaggcgttacttttaatttgaaatagacagcggaaactactgtcaggcaggcaccgaaaagatatgctttgtcaaacgaacagatttcggctatatatcctccggtcagcataccgataccaattcctacatcccatgaggtcaggtaggtggaagtagctgttccccgttggttgttgggggcaaggtttacgaacagagtattgaatgccggaaacataattccgaatccgattcccatcagcagggcaattccgaaaaagagaatggtgcaggcagcatcattccattgaatcagatatacacaggatgcgagcaggaagaaacttattataaccagattgagtccggcggcaattacttgggttatctttccccggtccaccagctttcctgagaatatacgggaaatggccataccgatcgccataaaggtaaaaaagaaacctgtttgtgtatggattcctatttcgcgggcatacatggctacataattggtggtcattccgtaggggatggagagtagcaacaggctgagtcccgcaggcattccttttaataaaatgaaacggtcgagtgaaatcggttcacgctttaccggtggtttataaggtgtcttcaccaggcttgcggacaggaatcccagcatacaggaaccgagcgcatagcagaatattgtagcgaaagaaacccctccgtcatgtaaaaacagtccgaacatcggtccgatggacatggcgatattattggtcagtccataatagcccagcccttcacctctgcgggaagagggcataatgtcaatgactactgtatttccacctactgtgaccatgccgaaagagactccatgaataattcggaatataataaatagggtaagcgagccggcgataagatatcccgcaaacatcagcataaagatgaaataagcgaaaagataaagcggcttacgggcaaacgtatccagcagatagccggaaaacgggcggatgcagagtgcagctaccgtataacaggaaagcacgatgccgatagtggaatttcctgcctgaaagaactcggataaatagaacggcaaaacaggaatcagcaaccagaaaccgaagtagagcaggaagttggctgccaagatgaaacaataaccgggagtaatgagtctatcctttgccataataagtgaacgttcaatttgctgatcggaacggtgataagccatcccgtttcagtgtaatcggtatattgattaaatgccaatgtcccaattaccatcagatggttttattggcacattggcatactggtaaattctgtgctctatttaatatgctgcttcgaattcttttaagaagcgtgtatcattttcggagaacatacggaggtcttttacctgatatttcaggttcgtgatgcgttcgatacccattccgagagcataaccgctgtatactttgctgtcgatgccgtttgattcgagtacgttcgggtctaccataccgcaaccgaggatttccacccaaccggtatgcttgcagaacggacaacctttaccaccgcaaatgttacagctgatatccatttcagcacttggttctgtaaatgggaaataagacggacgcagacggattttggtgtctgtgccgaacatttctttggcgaagagcagcaatacctgtttcaagtcggtgaatgatacgtttttgtctacatacaacgcttctacctgatggaagaaacagtgtgcacggtagctgatagcttcgttacggtatacacgtcccggacagatgatgcggataggaggtttggaagtttccatcacacgggtctgtacagaagaagtatgagtacggagtactacatccggatgagcttcgatgaaaaatgtgtcctgcatatcgcgtgccggatgatcttcggcaaagttcagtgccgagaatacatgccagtcgtcttcgatttccggaccttcggcgatgctgaatcccagacgtgcgaagatatcgatgacttcgttctttacaattgtaatcggatgacgtgtaccgagttcaatcggataagccgagcgggtcaggtcaagaccgtcgcaactattatcctggctctcgaactgttccttcaacgcattgattttgtcctgcgctttagttttcagttcattcagtctcatgccgacttcttttttctgttcggcagctacgttacggaaatccgccatcaaatcgttaatggctcccttcttactcaggtatttgatgcggagagcttcgagttcttcggcattggaggcgtgcaaagcttccacctctttcagaagttgttcaatcttagctatcatatttttgatgtattgttattcagtttcttagtaaaaaccgtgcaaagatataattttatcacgaaccatcgaaataatttgtatctttgttgccgaatgtaccgaaaatcggggaacacttatgaaaaagattgttatttctcttctgctattgactttatcgtttcgcctgtcagctcagatcgactatctggagccggtgaagccttttactacctatacgggtgagttgggtgagtattatcgaaatgtcttttctttgcttaatacaggttttcaacagcgtccttacgcgcgttttgtagccattccttctttttcaccggaatatgcaatgtcggtagagaagaagaacggacgttgtctgttgattgcgaatactttgtcgcgtacctattggcaggcagagaaaggaacggtgaaagtggaaactaaatcagtggagatcagtcagtccttataccagtctttgggggctatcgcccgtctggtaaccagccagatacaggatttggacggttcgacagccggactggatggagttgtttattacttctcatcgacagatgcgaaaggaaaagagatgatgggacggaagtggtcacccatgaaaggtactttgatggagcggcttgtgttggtttgtcagtcgacttacatgttttctcagggagaaaatatttcggaacaagcattggcggaggaagcaaccgctttattgaaagagctggagcaccgtaccaaagaacagccggacgctcacaaaaagccgatgtatgtggggatttattctgttggtccgaagctcaaaacgcattcgggaaagcaaattgaagaattaccctgcttggctgatgtttgtgtacgggaatatgtagccggacaaatgatttatcctgcggaattgcttaaagacaatgtctcgggatatgctttgtgtgaatttactatagataaggagggagtgattcttcgtcctcatatattaaaatcgactcatccggagtttgcagaagaagctcttcgcattgtgaaggaaatgccaaattggacaccggcactggtgggaggcaaggcggttgaaagtgattataccctttatgtccctttccgtccccagttgtataaagaacagttgcagatacgcgaacgcgagttgtccaaaaaacattaacgcccggaacttttctctttttatattgtattatcattgtaaccaataaaaaaagagaagatatggatgatatgattaacagacacgattcgattgctgaggaaaatatcgaaccgaatggccgtccggctaagaatgagtttgaagaatggagcactgaagttaccgatcgtgcagataatgtattcaaaggtgatacgaaagacggtcctatcaaggatcgtgagaaacgaataaaagaaatggatgaagtgataaaaaaggaccttgaataaaggtccttttttattgtatatatgatatcttttttaacacgatctcgtgcttatcgttgtaggccatgagaaacttttcagtaactttgtagcccaaaaatatagatagtatgataaaggtattattgcttgatgtagatggaactttgttgagttttgaaactcataaggtgtcgcaatcctctatagatgctcttaaaaaagtacatgatagtggaattaagattgtgattgctaccggtagagcggcaagtgatcttcatgagattgatgctgtgccgtatgatggagttattgcacttaatggagcagagtgtgtattgcgtgacggaagtgtgataagaaaagtagcaatacctgcacaggattttagaaaatcaatggagcttgcacgggaatttgattttgcagtcgctctcgaattaaatgaaggtgtatttgtcaatcgccttaccccgactgtcgaacagattgccggaattgttgagcatccggttccgccggttgtcgacatcgaagagatgtttgaaagaaaagaatgctgtcaactttgtttttattttgatgaggaaacagaacaaaaagtaatgccgcttctgcctggtctttccgcaacacgctggcatcctttatttgctgatgttaatgttgcagggacaagtaaggcaaccggtctctcgttatttgccgattactacagggttaaagtttctgaaataatggcgtgcggtgatggcggtaatgatatccccatgctgaaggctgccggaataggagtggcgatgggaaatgcgtccgaaaaagttcagtcagttgccgactttgtcactgatatggtggacaataatggactttacaaggctttgaaacatttcggggtaatataaaaatgtcttaatgaaggctgactacaaagccaatcgcaggtttaaaataaaaaaagagtaacttatcataagttactcttttcattttgtggagcgtatcggactatcgttttgatcataataacttcggtgtgattatgtattttgctgtatatcagtattatatgcgatgtgttgtatctttttatagcacataaaatcttgtacgctcaaaaaaggggggaataagaattaccctgtattccccacgatttttatttctatcttcactgaaaataaacctcaaaacagtaagacgtatgatagaaattaatcacagttgtagagcattccttaataataaggggcaagtagttattcgtgttagatggaataatcggaaggacgaagttggtttttctgttggttgtaatgccgatccagacaaatgggataaagagaaccaaagagctaggtataatactactcataaagttggtggaaagacggtggtagctagagatattaacaaccgtgtttctcaatttctagagtgtatcgaggagtcttttacagagtatagtttaaattctcagttaccaactaaaagtgaattgaaggaactggttaatgagaagctgggacgaataaaagaagaggcagtacaagatgctccaattaagcaaaaaaagtcttttcgtgaaattttcaatgattttttagaagtttgctctacagaaagaagctggagtgaatctgtacatcataaatatgttcaagcatggaatcatttaaacagctgtgatcccagcatatctctagcgacacttgataagaataagatgacagagcttaaaaaatggtatgtaaaaaatggatatcgtaaccgcaccactgtaaaacaattcagaatattaaagtcttttcttagatggattgatgccaatggttatccggtagagcaaggagtactcagctataaggtaaacttaactgtgactaaaaaggaagtgacttttctgaaatataaagaattactccattttgcatctttccaatttcctaaaagcaaagagtatttagatagagctagagatatgttttgctttatggcatttacatctttacgttattctgatttaagcgcattaaagagagcgcatatttcaaatgggaatattgagatgtatactcaaaaaacgaatgatagaattactgttcctataatagaaaatgctcaaaagattatagataaatattcatggtatcactccaagaacggtacaatattccctgttgcttcgaatcagaaacttaatgattacctgaaagaagctgccgagttggctggtttagatagagagatagttgaaacctactttataggtacgcaacggcatgaagaaatccataagttttatgaaacgataagctgtcacgatggacgtagaactttcgtttgctgttcattagctttaggtatatctccgactgttgtgatgagttgtaccggacacgcagattatgaaagtatgaagccgtatatagaagtagcagacgaaacacagaagatgcaaatggaaaaatggaatactcaccaatataagtctgatatcatagaaagtctagataaaatgaatccgacacaattgaaagaactttgtgaacatattaggagtatagcttaacaaaattttatatatttgaggcagcattcgggaaaaacgggtgctgctttttattgtaattgcttaaattaatactattatggaaaacgaaaatatcactttaaacgaagctagtattttctataagagaatagacaaggatacttatttaatcggtaaggataaagatagttacggacaatttttaatagaagatgcgatcgctccattattattctcttcgattaatgaaatcaataggaaaaagatgacaacagattcgttatctccagaccgaagatttattttttatttttatctaatgactttatattttccaaaatccatagctagtatctggtctagtcagatccattcatattttgaatatgaatctaaaacaattgagcaagaatgtctgaatttagattctaaaaaaacagaatttgcgacagaagcttttttaagaatgattttctctattatgaatttgacagatgctttagattttttgtatcccggatgctttacgtttgaagaaaaaaaatcgttagagaatacatatcaaacagaccaaaaatcttttcccaaatggtttctttttgaatatagtgataaaataaacaattggattagtgagatgtttaaggctaagtttttttatgatgattatattagaaaaaaaatattagaaagaggattacccgttgtccataaaaatgaacaatatgaattaaactggatttttattcaatttgtggctatagatcgtgtagtaagagagtttagtactgaatatgaagaatggaaaagtaatatatacaccactggtatattcaatctagagaatgtgatactaacatatacttatgctcttgataaactaaattgtttccggacatattatacattttttgagaaacgtatattatctccattttttcgtatgatgcataataatacgctaaaaaatgaggaaaaagaatggattataaggaaattacgaaatttaggtatagatggctttatgcaggatgagtataatatgtataaacacaaaaacgatgaacatataattcacttttgtgatattgtagattctccattaacaaataatgatatttatcgcttacctatgccagatggatttgataataagaaattagtaaaacttcaccaagctttttatagttatgttgatgccggacagcctttgtgcttttttttagggagcagtacatctaatactgatacaaaaactgtattatggaatggtgaccgtcacacccttcaagtttttataagagaattatatggtaaagatgctaaaggaaaacttaaaactgttcctgatggtatatggaaaataaccagtaatatttttatgccgaaagggaaaaagttaagtgagaatacattaaaaacggggaaaataggaacaaaacaattaccggaagagactagattagagatagcggagaatatccaaaaaataagaatcttaaaatggaaagatactaattgactccattatataatattctatataacatatatataacgttcatataatttgcattatatatctcataatcacggaattacacttgctgtaattccatttttttgtgcatatatttgtgccagaaatcaaaacgatcgtagcaaggatttcaatagagtagtaatataaaataaatatataatgaaaactttcgaactaagagataagcctcttttccaagctaccttaggtgatctgatagaggcattaaatgaagggtttgctaatgaaggtaaagatggaagagctaacacaaatccgtcaagtgagaaacggtatgtatatggtctatttggcataagtaagctctttggctgtagtcaagcaacagctcaaagaatcaaatcaagtggtgtcatcgatgcagctatttctcaaaatgggaagatcattgtagtcgatgcagatctagctctagatttactaagagtgtctaataaaaaatgggggcgtaagtactccaagtaattaaccggaatagacagtttcgttggaaaatatgccggctattttcaatggtgaagctgtctattcataaatcaagaaaaagcatgaaagaaaagaactgggaattacttgtcttaaatgaacaggtaggacagattggagagattggtgtagctccaatggtaacagtttcattagtgaatgtccagcaagactctttgataaacaaatcagagatggtcaatgaggttcagctatggctaaatatgctcaaatatgagaataaaatgtagtgatataagatcgattataatcaagtaatcgtgtatgtaactaattgaagtcaagaaaattaatatgtgtaaaacgtttgatttattcacttatatttgctcacgaaattaaaaaaataaccactaaaatcttagaaaatggaagaagaaagaaaaacagtaggtgctgtgttaaatgagcagaaagaacagaaatccgcaaaaaagaatggtgcagctcctcaaaaaggtaagaacgcctcagtagagtctccgaaagctgataaggagactgaacaagaaccgttaaaactcactcgtggtcaaatttttactctcacaactcttcttatatataaatatcggtttgctcgcatcttagtaaacagggatattgataaggaggaggtaaaaaagaagattgaatcaatcagagccgcaaagggtgttataacccctttcttggtactttcggctaaggaatgtatcgaagcaggtcttgatgtagtggactataatggcaatgttataaccaaggatacccctgatcttgaacacattctagtgatattggatggtcagcaccgttgggaagtcattaaagaacttaaaaaggctggtgaggactatgaagcttactttattctaccacttacagatcaatatgatcttatgacgatattaaaggaggcgaatacttctgtgaatccttgggatggaattgattggctaacgatggctatccagacagcaaaagttcgtggtcttgatacttccaagttggaatggctgaaatctttagcaaatacagaaaacatttctgattctgcggcttccttattcgttactgggggtaaaaagatatactcaaaagccacgattaagtctgccattgattcaaaagaccctgataaattggaaacgctagttgatgaggatggacttgaccgtaataaaaatctttatgatgctgctattgctaaattgaacataaagacagttggcttgaaaataactcctaaaatgctatttagttttgtagagcaactcattaacaaaaacaagccgattaacgatgcgtatgctcatgtcatcgagtttctaaattctctttcaaaagagcagatagaatctcttgataatgcaaagaagactactagcaggagcaaagatcaggttattacaggtcttttcaagagttattggaaagcatttaccgagcgagaaaccttaagctaaaattgaaaaaatggagggaggggtgagagacctctctcttttaatgagaattacgaattacactcaaatcataattgaaaaggttaaactctatttcctctccatagtgataagtttaccaaagtgatacgagaatataataaaacaaggatatgatgacattacaagaattaaaacaaaaaggatatgtcttatgtttgccgcaaaagatacgcttagacacaggactcataggaaaactgacatgcaatctacattataatgccaacgcaccgatgctacatgtaattcctgctaagatattcttatcaaggggatggttggctgtagatgataacggagaattgatatctcttcttgatactgatatagatcggaaattagtattaatagaagatattagcttgtactttgcattgcaacagacaaggatacttgatagtaatatagcggtagatatactcacagaaatgccaagaagtagaaaatggactttttaaagagatagcattatgccaaaagtaagagactacaaggacatagaagttgtgttcgatccgtctgatacaaatttaactattaaacatcaaaccggagatgccataattccatgtaagggaggggcttttattgttcctctcccatgtggaggtggaaagagtactgctacttgtgatctggttgccaaaagatgcgataagggaatagtgatctttgttgctacacgtgctgatgcaaatgatatgaagaaaaggctggaaagtctgtctctccttgcattgaaagacgaaatagtgattttacatcaagaagattattactacagtagttacatagcacatcctgaacaggtaacaaagaaaaaggttctgattgtacccagtgttcacctctatttggattatctgccagccctatttgcttatgataatgagaaaatagttgatatagctaaatatactggaaacttaggagcattactaaagtctaccgaagtacgcaagttttgtattatagacgaacagccatcctttatacaatcctttaatacatttgaacggcttaaaattcttgcttatatgggcaacttggggacatcatcaaaaggtagcatccccgttggagcaggtttatattaccattgtttaggaatacaggaaatgaaggctgtgaatagtacattcttaagaaaaaccagcgatcatttatatagtattaagtcagccctgaatacatatcgagaggaagaggtattagtgtatatcaaccaaaattattcagttatatggaatgcaaaagggaagtattatccaatatatcactttataaaggattgggtggtaaagaggatgcagatgaatgttatcatactggatgctactgcggatgtgttaagcgattataagaaaacaccttttaggttgatccaaaattcggggaagatgtactcgtcacctattacttttcaagagtttccgatgtcccttgaaagatggttgttcgagaaagatgtagacgataatacaattcgtgacagaatacaggatatagttgatgagttggcagatcagatacaacaggcttctccgttgcttattgtcacatggaaatacatggtagccagagacagtgatccagataaagaagataagcacctgaatataatgacagtacttgaagaagaactaaataaaaaaggattggcaggaaaatacagtattatctatcgtggttccggtcaagataaagctaccaatgcttttagtaattatgcaggcatctcttttgtcggagaatggcgaacgggcaaatctggattatccttgattaataaaaactacggcattcattcgactgaacgaagaataagaacagctggaatgattcaagctatatgtagacttcggataaggcagcataatggtgatccgattcatgtattctattccgatgatatagatccacagctaatgaaagatgtctttgattatttcaaggagaatagtgatgtgggggtaatcataagtggaatgcctgttcttatgccagcgacaaaaagaacacctgtatttcttaagaaggtagtagccttgtgtggctatgatcctaaactattggatgccataaaatattgtaggacatatacacttacagtcaggttgaaggatatccttgtacttatccccatgaaagaaaagaaagctcgctcgtatgatccgttaaaagatacgttaaagaaggagtataatattatcctcaaagtggtacgatagtaaaaattcgttaggtgggatattctcctacgatctacattactattatataagagattaataacttaaatcccaccttttataataatagaatatgacagataagataactttaatagaaggattatttaggaatcagtatgtctgtatatcagaactacttgatctaaagaataaaatagaaactccttatggatatataaaggatattactttagatattcagagaaatatgggtaataagaaaaaacaagattggttaaagaagaaattacctgtagttttggttaatggcatttttggaaaaagattagatacggcattatcagattattcttgctatatctgtatagacttagattatgatctccccaataagttatcggaaagagattctgattgggtgaaatacactagtgatccctatgtcaggatggctttccattccccaagaggaggaataaaattaattatccaacatgattcccttgatccagcttttcataaagaactgtatagctcaatcagtgggtacttggggaatacgcatatagattctaaatgtgataatttgtcacgggcacatttcataagttatgatccaaaggtatattataatgcagattcacagacataccactttgtccctgcttcatcaacaggcaagattactccttatgtggcatcaaagactataaaaagtacaggtacgacattttggaaaaatctcatgttaccgccaccaaaatttaagagtcctgatcaggctataaagaaagtacaagagctatcggataggtatttttctgttagtcggggatttcggaattccaatctgtttcggtttgcttgtaaactacatgactatggtgtctcaaaagatgatgctcttatgtatttgatcttgcgttatgttgaaccggactttgacggaacagagattgaaggaatagtcgaaagtgcatataaataaaaatgattgaggagatagttaggagtgactatctctttttttgttaattttcttattttctattcaatataatgattttataactacttttacagaaaagggcaatacataaaattacggaatatgatatgtcggaaacataaagataatcaaaaatatgaccttgaacgtacattaaataagttatatagatgtcgagatatggaaatcaccaatctttggcaacgttcaattttcttggcagtatttttaacattaacgctttcagggtatggtattcttgcttcaaatttttttagtaataatgtatttatagaactaaattacaagattcttcatggtgctgccgttgctattggattattaggttttacactatctgttatttgggtgttgatggctaaagggtctaaagcatggtatgaagtatatgcaaaagctatctcagattttgaagaagagtttaaacatgaattaggaataccacaaatatatttgatgggaaaagtagactttttagataaagatatggagaaaaaagatgatgacggcttctactgtaataaaaaaataagtaatattgatagtggggcttattcggtgtctaaattgaatatattaataaggtgggttttccttatcacatggagtgtggtgataatattacatttatcagcttttatggctttattattagagtcttggagttgcttctatttatctatttgtcaaaatagctgcgtgttatatattatctccgcttctttggctggtcttttttttacatttatctcactatttataacagcgagattaaaaactttatcggctagtaattatcttatggattttgactatagaaaggataatagggaagagtatgaacaacttactaaaataataaaatgaaaaatacattaaaaggaattctggaggcttttcaaggagcacatggagataaaaagttattgctagaggaaatggataaacttgctcaccatttcttctttggtggatatttccaagtaaacaatagaaagatttatcttcgtgatatagaattctattaccatgaagaaggtgaaggagcaaagatcaaggattatatcatgtatcatatttctgataaaataaaagatcctagtatgaaaaatgaatattatccccttggttcatttaacgcacatgtatcgggagttgattttacttttgaaaataaagatagacaatatagagcttctattcttatcagaggcattaaggtggtagacaaagatagtgaacctataattgaaacaagaccaacctatgtctatgaatatcttcttatgggtaattctctttttgatgatggcatatatattaaatggattgacgaagaattaccaactgaaccaatagaacagggttatcgaaaaaatgtatgtcaatatgatccttttggtaataggatagaatatcaaggagaatcgaataataaatcaatcacacttgggaaaaagaaatactgccaatgtacacgtgaatggaggttttggattaagtaggcttggcaataattacaatatatcgtaatcttagaaatacagtcttggaattaggaaagaatatttcctatattaggaagggtgggattactttaaaatatgtgatattgtttactgtcattttcacctaaatttactcttaaattgggtaaatttactacaatgtgttgattttgaatattataagttgcaatttaaaagagggctaattgaaaaggaaatgctggttttaaatactcaaaattgtacatggaaagctaagaaatatcaaaatgaatttctatattttttgtattatatcaatatttactatacatttgtatagcagaagtttaagttttattgtataattactttaaagtccaaaatattatgaaagatatatatgattgccataaagaccttctaggtttctttgctgattttgaaaggtataaggaagaggatttgacagaatcggatacgaggtcaaaaataatagataaactttttactgaggtattagactgggatgaaaattccattgatcgtgaaggttatgttgtagagggcttttatgattatctcttttctattccaggatttcaattcatagtagaagctaaaagaaattttgttgattttataattcccaataaacataaagctgtaacaataggtacttttgcaaaagagaataaagatgttgttgatcaaattcgtagatacttatttgaaaaaggattacaatacgctgttattactaatggtcatcaatttattatcgggaaattttgtaatacagatggtagcgattggaagcataataaatgtttaatattcaatgggcatgaagatatttcagagagattcatgtctttctataacatattgtccaaaaactccatttcacaaaattctggatttaaaatattcttagaggaagcaatacaaagagaaggaaaaacaattttatccataattcctgcaaatgattctgaacttgttcgcaattctataagctctgaactcactccgattattgataagcttttcggggaattgtatgacattgatgacgaagtaaataaaactcttatagaagaatgttttattgagaataaagagattaaaaaaaatcgttctgaaattgagaaattatttgcagatgcacctcctcaaattgataagatagtaaaggcacgaaatacagaaagtattgtggatcaaataaaggatgagtttatttcagataatcttaaatttaatctaacaccacctaatccaataataatagttggctctaaaggtgcaggtaagacaacttttataaactatttatttagtaagaaatttggactagaggcaaatcatcctcatgtttatattgatttccgaaaatattcaggcacaaaaaataattttgaaaattatatatataatgacattttagagcaagtctataatcaatatgagaacctagatttatgtagtcagaaatcactttgcagcatataccatagagagattagaagaaataatcaaggtatatggaaatatgacttagaaaataataatgataattatcaatcaaaacttagtatatttttagaagatagacttaaagatagtgaatctcatttttttaaattgtctgatcatttaataaaaggaaggcacattagattatgtatcgttattgataatgcagatcaatttgattctgaaatacagaaaacagtttttctatttgctcaaagtttaaataaaaaaggaaatatatcaattataattgcattgcgagaaggatattattacaaatggaggcaacttcctccatttgatgcttttccttcgaatgtatatcatatcactgcaccgccatataaagaagtacttcaaaaaagaattaattatgcattagaccagatgtctttagaaggcactagcaaaggaattgctggagagaataagttattgcaaataagtaatgattctgttagaaggttcttattaagtttaaaaacctgtttatttggtaatgaaaattctgaaatgttatcattcatacaagaaacaacttatcctaatattcgagaaggacttgagatctttaaatcctttctagtatcagggcatacagaagttcatcaatatgtattaagacaagaggctgaccctgacagtacaactattattccttattgggaatttgtgaaagcagtaggactgaataacaaaaagtattataaccataatattagcattataaataatttgttttatcctgttgagggaaatcttaatcatttcttaaaaataaagatattaaaatttctggatagaaaactattatcggaagggagctccgaaaaatatataaacgtcgaagaacttgtgaatttatttgtcaatgtagggtatgtaagcaagtatataaaactggaattagaagagttatgtcgatttaggttggttgagacagatgaacaaatatcagatgttgatataatgatgaatgttaaattagaagatagtgtttgtatttctatgaagggacatcattatataaatactttaataaataacttctcatatattgaaatgactttggaagacacgcccatatttaacaatgattattttttagaaataaaaaactcttttccatattcagatgaaaatgggaagagaaatttaaaaggacgtgtggcagtagcggagaaatttattgaatatttagaagaagaagaaaaaaacgaaacacatgaaagccaagctcttgcggacaaagttgtccctgccataaaaattggatgctataaagatatttcgagaataaaaagaaaaatagataataattaattaggatgaaatattagatattgttctatattataaaacaaaagggaagatagttttcttacaactaccttccttttcttttaatatgccaaagccagaataatcttatccagcattattccaacttccgctaatttcaaccgacttcctccaagtttaatcgctgattttttatagcattcaataaattcctcctttggcataaagaatggataaccgtatgggactcctccccaatagacgggaactctaaaaccatcgaatccatgaccagttataatctttgcgtcagtgcagtaaattgtctttgaatcataattaagccaatcaatttctccgtccctatattggcgagtgaatattagctccaaagtcttctcggatgtaatatctattttgaatctaatcccaccagcagagaacttatctaaatccttctgtacctcattctccatttcactaatttcttgtttggcgagatcatacaccttgcccataacgaatattttctttttcatattattctagttttctttttattattattgatatttctccttgtccatcagttttgaaacttagtttttcgaaattaacaagttggcataaccgatcctcatatatatctattagccattttaggctaaccaatgaatgcccatcttcatcttcatataattccctgtcttcatccgctatatctgtcatatcagaggtagtcagactaaatatatgagcagccaattctatagggacgtaattagcatcatcagtcccatatagttgagggggatattttaattggatgaatactgcatcctcaaaacaactgattctgtgtctgactggaatatcagagagcccgtccattagaagctcgactatggggtaatctacttcccgcatatctcctgtataataacgcttcatcgtttccactctaaaattggctatcaaagacaagtccagtattggcatctttgctagccgggggtataagataccgttctcatcaatatagctttcgggatcagtacatttcaaatctttatctcttgctgttgaaaatctttttactttcatgttacttagttttttgtgatttaattaattctgctccagatgttttttcaggtattcttggagtttggtatttaggctgcccattgtactgccattgctttcgctataccaggaaatgttttacttcttaatgttctcctttcttctgccgatactcctgaaaagaaaatgtctgtgtaccatttgggtgatttgttcccgttcctagatatgacaaacgctccctttcctactattttggttggtaccagccgaggaagattctttaaccatagacatgttttttttgaggcttcatcgccaaactgccaaggttctatgatctgatccggctttctccatcgagtactcattatgccaacaggattttctatggctatcttcttgattcctacactagctacggacatgaaaaactgaacagcttcttccctgtctgccgctctattcggataaagtggatgtggtctcctttcagcaatcggtaaattactatcgtccggatgataataccatttagctccactgaccgaaagataggtacaaggtggatgggcaatcataatatcccaatctccatccaagaaatattttttcctgttttgtagtgttcctcctctgtttgctataatatcgaacatatccccttgatagtgccattccggatgtccaccactacaaaggaaaagatcacaactaaaagcacagtgacctttttctctgaaagccttgcataccgcttgactttcttcacatgctacaagtatgttcatcttaataagctgtttgaaatgccacatccgccttagtcttttccagttcctgtgctctaaataaagtgaatcttcttgtgtgttcgtttagggattcttgtacctgcgtgtcaattgtgattaaggctctgttattggctgttaaacaatttttcataagtcagtcttttgttttttgtgatttaataattaaggttacattataatttttattcaggtattcttggagtttggaatatctgtctagcctacatctgtttcttgggcataaaacaaatatatctttaaggcttatttctaatgttaagttatagtctttactattcttttcattcaatagagaagccagttgaggaaaatattctcctaaagcctttatatcatcggagaatttattcgtttgctctttcgaatcggagtatgattctaccggagtttttggtatgtcaccacaatctttgttgagcgaataccagagttgggatgtgtctgtcataaatttaagtatttaattcatagttagggatttcaaggtttcttagtagagtttcggcatttttggggtaggaggaaataaaaaaacgagataccaaattaatgatacctcgttaatgatagctctctataatttaatcatcgttatagccttcatctggatcgtcaccttcttcaggtctatctatatcccattctgtccatgggtctcctgtataaacatccccatcgtcatcattgtcatctctatacatttctaaagatctttctttcatactcttatctgatttattagtgttattattctaacaacatttgagaacgtctacgcatatatataatttgaattacggaaggtattgttacacgataagcaggaccagctacatcaactaaagtccataaaacggtcactagccatcctattggtccagcgaaaatacttatatatttagtcaatccggcatttaaagctaatgaaagccctctgcctaataaagtttgagcaactgcatttgcaacaatcacagccatcttatatggagcaaacccaccatttctaatagccatttgtaatgcgattgtcatcccttgcttagtaggagtctgagtttttatattcatctcatcaacaagctttttcatatcttctgctgtcatctgttccagtgaatctgttaatattttctgtaggagatattcttctatcatttctatagaagcgttcttattgtaattgactttcattctattacaaacatcaaataggatcgttcggtatgtaacaccagtttttcttatacaattagcgatcgtgttaccgccaaatagctgaaattcattcgctatatcttcccacatgctagtgagatgatcgggataacattggagataagcattactttttgtcaaagtttccaaataacgcttctttccatccttatctgtagttaagtaatccactaggatttgtaagtcttcattcttgcagaaagcaagaaattctaaatctttgtcttctttcataagttattcttctatatattcaactttatcacccattacattataataagcagttatactacctttaggaatatgtactttaccaccatatctgataaaatcaccttctttaattgtaggaggtgttgatgatttgaaataaaagtcagcaatagttggagctttttgtatgtattctccattgggtaatgttgaatttatataccgatcattccaagaaccaattttggttactgattttggcataactattttattcattctaaaacagccacttatacatccgtgaggaatctctacaagtccttcgggaaagattatattttgcaatcttatacaatttataaatgttttatcgcctagtttttttagatttttaggcaattcaatctgttctaatgatatacattgaccaaaagccatttctccaatggtttcaatactttgaggaaggattactttcttaaggctaacacaaccttcgaatgcagaaaatactatagttttcaaataaggagggaattcgacagttttcaagtttatacagttcttgaaagcttctctatatatacatgcggctcttaaaggcaattttactgtttccagaagaagcattccttcaaaagcattatatggaatacaacagtttttctctggttctttaaattctgttgcagattgcaatatatacgttaaagctttatttgcttgatattcatttgtagaaattttctgatccctgtattcattatccaatcctttccctagtaatccaaacaagaaatttaaagcttccgtatctgcctgctgtttctttatgaactctggtgaataagtaatatatgtgtgagacagatctaagtattttaaagccttacattttttgataatatctaaatccgtttcataaagaaacccggtaatagttagtgactctactgagctaagattttttaatggtaaagaagacaaaatacttccaggtgtttcaactgtaatattgaagctgctttgagcgtctttttgaactatattcatttcgttccataagttctgcgaatgatatgccgtaaaagcatccttgggaacaatcattttatatgtagagttccatcccaaattgtccaaactccttgtatcgttaatataaggaggatttgaagatagaaaaacaattctttctattggacaactctcaaatgctgagaaatatagctcttttacagactggggaatttcaatatctttaatggcacatttatagaacgcattttcacctattgatattattgacttatttaatatcactttttctagtttgttgcagtttaaaaaacaataatttggtatatacttgattttctcaggtattttgatagacgtaatattagaactagcaaaagcaaacggagtgatagagtctatattggcaatatcattaatattatacttatcatcccacgtgtttaatattgctagcttgtcttcattaataaaaatatagttaggagaaatttcttttaatggtaaacaatcttttattaaacaatcagccgttggtactaccaatgaatctacgaatattttttgatttatattatgtacatactctcccttttcattatagaggtttctgcgttcataatagttacttgttctacgatcttggcctattaatctgtctagctctctttgtctaatgttttgaggggcatccttgaaaacatctagattaaattttgtcaaatcgttctctaaaatattaactttcttaaggtgtatttcttcacgattatcgctatacatcttaatctcacatcctcgtctaatatacagcacttctaagacaggaatattgggaatattacttttataagggtagaatcctgtacaagataatggcaaccacaattctttcaaatgagttaatactggtaaagtcaactcattatgtttagtgaattcctctttatgatctttctctttatcacttgatagaattgcatcccttagatccaaatattccaaattattcatagaaccaagataagcaaaatcttcgctgttcatagtccctgaaatttttaatttggtaatatctaacacgtcctttttcttaataacacttgataatttgccaaccttttcgttggtaacagtagtaattgtttgtgcataagaaaatgttgtggtcaaaaggaaaaagagtaactggaacaatttaggtattttcataattttgtcctcctatttgcttataagtctccgaattcagcaatctttaaaagattaacttaagtatggacataaaaagagaggctttgcatttgatcctactactaagggctaccacaccctgcaaagagaaccaaagcatcacctctcatgttgaatatgtctgataagtatataaacagcaaaatgccgtatatacttgggcatatacagaaacaaaaaaagtgagtgcatgttaattggtgtcctctttgcttatcttaatgtggtagtttaagtagcagaacttaacgcacttctatgtctgctagaatttttccagcgtgacaaagataagcgttttccaatatttagcactcacttatgagtatttatttttcttgtttcctttccaaatataaggctttttagttttcaaagacggtgaataataaaaaaagagagccgaagctcccttaatttctatttatcgcttaaaaattgatttttaattctctggactgttgaaatcccgattccttgaagtttagcaatattccggacactgtaccttttctttaacaagataatagtctccttatattcctcccttttcttttcctccgttttgattgaaccagtttttctacctagcttaccaccatttgaaatataatttgccctaccactatccaaacggtattgaatattacttctttcgatatttgccatttcggctagtactgtcaccatgatactggtaatgggattaacttctccatttggttgcaaagtatataatcctaagttctgtatgtaaaccgatactttggattcgtgtaacatttccaaactccgtaacacttgtaatgttgatctaccaagtctacttaattctgagagaagcaagaaattcacagattcacgtttacagtattctaaacattctcctagaatctgcctttcctcaattttctttgctccagatatatgttcttcgtatacattcacaatttctatattttgtaacttagcataattttccaaatccttgatttgcctacttgtgtcctgtctatcattgtttgaactgacacgagcataaattactgctgttttattttttgtttccatattattctttgattaaattgataacatgaaagaatgtgttcaaaaccgtctatcagatttatttgaacacatctttgatttgaacacaaaaagaggataaccactgcaaagcagtctcctctttcatttaattaagtatgtcagattttaatttttctgatatttactcttttctgataaaatactctattgccgaatgaacgagaatataataatctctattcaccctacattgattctcccacggattatagaattccaaacatagttccttatataataaaggtagctgtttcttgatccgtcttactaaccaaccataattaagtggtcggcagtttttcattttctgtttccatttctctatcgagttctgcgaacaagtacattctagatacatattttatatataaggtaaacattctgctgctatcactttcaccaatttcttggctacttcatgtgaggctttgttacgagcatcataatatctgctatcatcagcttgtacgttaatcatctctcgtattaacctaaataatgattgttgtagtgtcggatgaaagtacttgatactctcggcaaacttcttataatcaaaacacatatcatttaaagcattttctaattccattgcagccttaaattctctactattttctaattcaaatctttccatgactcatttattttagttagtaattcttgttttattacctcaataagtttcggtacagattctaggggtatcactttctcgttagtttctgtttctcttcctttaattgtatagttttcaagaaattctgttatttctgattgtttcttttttctcataatgttttgttttaatgataaattaaaaaagaggataccactgtttttattagtgataccctcttcggtacatttctttttcttatgacaagaaccatgaaaagctgttatcttctccagttaatgccttttgaattccaatagctatatccgttgcattctgatttctttccaaccatttatcaatataactcgacttagccgcttcatttaataactgcattagctgccaacaagatatactacctaatcccctttctccaaagttttcatttgacacaaaacctttggtggctgcatttatttgcgaatctcctaaaaggattgttggtagttctttctgctctgacagtggtaatacttgataaagtcttagccgacctattaattgacaatactgttgaattgttaatctagtacgtcctagattctctaaaagtcttagatttacttctggctcaaaagacgtgaatagttttattgccgattggtatatatccaaatcagacatagcttccagtttctcttttaatccatcacaagttagcatgagatttgaacaaacctttactcggtagccgatgaatattttaaatttctccggacttttccttgaataaagattttcttcgtgataactgcgtacaccacctatacagagatgtacttcttctccattgagtgttttacttatggatttaatctcaaagcaaaatgccattctttgataaaacaaagtcttttcatcttctctgagttcgcttgtttttttatggagagcggtcggaattctgccaatgaccggatgcgatacccgacactctatctttcctaattgctctcctagaaagcaatcatttgcagcctgataaactttttctataaagttctgatggctgattgttaatgaattgtccccgaaaacgggaacaacacatttgttctttagttcttccaatgtgatttcattggtattactttctatgaaatgaggatgatcttcttcaaccattacgtttggttctactataactgcatcttctatttcttgatctaatatatttcttctcattactgccatccctgtttgtgggatgatacttaaatttgtttccatatttatttgtttttaaattgtttcttactctgtttttgtttttgagaccttcttcttcaaaaggtttctaaatttctttccatttttaagcgtacatagtacgacctcaaaaattatgattagacctgtttcgatcttctcgaatttagtcatgatcattcttctgctttaaatccaaccggatttggtttctgtcgagttcgccttttaataaaggaatctataaactcaaacgcttctagtaaatgggcaagtaacccgataaactttactacttcaataatcaattttacttttttcattgttatttctccttattctttaattgttaataatttattgtttctatttatttcattaataaggcgatcagaggagtataggaggtaagtcaatcggtgagaagaaaaaaataaagagagcctttagctccctatgttgaaaaagaatatagatatgagaaaatccccatttccagtggtcataacttgtataatcaaaactgaaaatagggatttaatctctcgatgtgataatgttttgtttttagcattatccaaccgcttatatgttttttatttcttatctatttgttctttctcatatattaggttttgaggggaacaaaagcgtagataaaactaaagtgataatagtcagaacttcatttttacaatttacttctatataaaatatctataatcatattcatgttttgaattggaatctattaattttccaatcctagcaatatcatttgatgaacagattgtagcaggtaattgagaatacatatttaaagaattccaattcattttagtcagtcctaaaatttcattagcgatttgctctaaactgcctactccatagtgttttatgatacgtaagggtttaggtatatatctaccgcctggataaaaactaaaattaggatttcttactgatggaacaacgccatgcgcccataataaagcctctttactatttaataaaatacaactaccccttgatacagaaaagccatcaacacaagccttcccttcaacaattttacttgatgtatatttaatattatcttcaaaattaatctctatcaaatcaattgattctattttattattatctgaaatgctatcaataataccttgcttttcttcttcagtgaaataagttcttttgtgaatcaccactcgttttgggagctcattcattgactcataaaataattctatgatattcttaccaaactcataagcgtcatcatagcataaatgaggctttctgtgtctccattgtattttgtcattactaattctcgctaatttaaattttaagccttctcctgatgaactataaatgtgactacaccctaaaacgatatgtccatttgaatcgactttactatcaacactatatccaagtcctgcaaatgcggtagtgttatctgagtttgcaagaatccaaggggttctgaaggatttgacataaaaagatagcgaaagccaccaatgtatttgacacttctggttatgatcttgaactgttttttctctaattaactgagacataatacctttttctgcacaaaaagctttgatataatcatgtagatcaaaagtttctccatcgattgtatatgaagtatattcttcccatctctgagggatatagataacaataatttttcgtctcgtagtagaatttatttttgtaatgctattacatattatttgcctaatatattgagatatttgttttatgctcttacttaaaactggctcttctaagatttcccattcgtcatcatcaggtgttggaaaattgagactaatgtcataggtcttgtaaaatccctcataatctattatgtaatcatcgttttgattatgcttttttatatgggaattctggttttccagaaaatgataaaaaacagcagtgtcaagtttcggagaaataacacctaattcaatagtatctcctagaaaagaatttattcctgtttcatatggtttattaaccaacaaacctctcattggatgaatgtcggttgttgtcctatgaccatttttagtagaaaacaataatggtacttctttaaattgaataccctttaatttcaacaaggtagacggaacattatgggtcttttcatatttattatttaaatcacatatatctgtaaaaataggtgctgcgcttattttaaatttaaatccagtccctgagttatatggatattcataaacattcttgcctaccattaaaagttttctccagttttcaagatattcattaaatttattattccacaatttatgaaaaaaggagatgccaacattttgtattatagacttttctaaatctggattagcaaattcaaagtccgggtttattattaagtaatattctccagatattttatcaaaagaaagtctgatagcattataaaccttttggtatgctatatttctaaaattatcttcaatccaaagtttatttttgaaatttgtttttagattatttgattgggctagtgatttgcaaaccgtagacaaaagtaatcgacttatagcagtgttgtatattttaatatctgctaatggctttctttttatatctccgtttatgacttcaccaaaaacagtccttattacatctaattgaccaaatgaccaaatttgtttattatacggaactgctgaaatatctaatcgttctaagactttttcatctacatattcccaaggtttctcttgtatgtttacatcaaatacaaatacttcatccggaaattcaattctaaaaatattactttttaggactttattaactctctcaggatttaaatcaaatggagtaaatgtttctttataattgttggttaaatgtaaaccaataagttctttattcagactattattgtcttcaacaacaatcttagctatttttctaagagtcgagtcaaaaccattagttggtatataaaaagcattacgcccattttgatttgcaattgtaatcaaattttccacctcagcattaatatattctccataaccacaccaataaagaatacctccacctttttttgaatacgcttcttttagtgtatccatcaaagatgcatctctcccactataaccaataacaataagatgtttatcttgaatatagtcaattaattttcttcgaaagcattcatcttgatttaataattctttttctgtattttttaattctccatatttaaaatccccatgtaattttatcacagggagttcttttctattttgagttctttgattaattcgttgtactgtatctaagcttatttcaatagtttgaataccctttcctgcacaagccgttattattaaatcatctaaatttgttgtccatacagaatccaacattccagactttgccaatataggaattgttttatagccaatagaaggagttttccctgaacatattttttcaaaatattgtcttctatgctcatctataggatagcatttataagcataaaaagaatattcttctttagtatctttttcaggatatataccttggttatctaaccagttttgaattatagtttgactcttcttatttttataattatcaatccaacctagcatagaaggattattagttttgtaaataccccttttccattcccaaatacagtcctcagcagaaggaatatcggaattaatggagcaaccagcacctaacaatagagaaaaagtatcatttttactaataccaatagctcttagaaattcatcaaactgtagtttgcttatattgtcatttttcacactcatatatttattctgtttttacaaattgtcagttattaaatttttcactcatacctgctacaattccgcgatttgatagagccttttatattcagttatttacggttacagaagtaagagttcactatcttaaagcttatgcgaggttgatcggtaagccatacttaccttatttctattaagtacctctttttattttattcatacttaccttgaatatttgattcatttccaaagatagattttttcagggatatttaaaaaaactatttgttatttatttagtttgattctggaaaattacgatgaaatggggaaccgcataaaagtacgaaataattatcgtataaatgtatcaatgttattcactagttgaagggatgacttgatattcttatttctagatttaaaaaagttatggcatacaaataaaaaggatgctacaatttacgtttcttttttccttttagttttttaatattagttctttatgattagctgagaaacctattcccgatcctacaaaagaaatgaatgaaccaaatatataatcttatgatgctagtaaactgattgataagttaaagtagcataaatccaaagttcttttaatggggaatagaatgggggaataaagagattagtaaaaagaaaaagctctgaaaatcagagctttaaatcttgtgtatgtggagcgtatcggactcgaaccgatcacctcgacactgccagtgtcgcgctctagccagatgagctaacgccccatttttatgccactgatataacgtttgtcaacgttttgcttttgttggcgcaaatataatggaatattctgaaataattgctatgtttgcggaaaataatttattgaaaggacagatgatatgctgatttataatacaacttttcaggtggacgatgctgttcacgataattttttgatttggataaaggaaagctatatacctgaagtacagaaacacgggacgttgaaagcaccgcgtatctgtcggatactgagtcatcgggacgacggaagttcttattctctgcaatgggaagtagagagtagtggattgctgcatcgctggcacatggaacagggagtgcggctgaatgacgaacttacgaaaatattcaaggataaagtagtcggttttccgacattgatggagatagtagagtgattcaaccggtaaaagaaaagattattttgggtatagaccccggtacgaccatcatgggatatggagtcttgcgcgtgaaagggactaagcctgagatgatcgcgatgggaattatcgatttacgtaaatttgccaatcattatctgaagctgcggcatattcacgaacgggtattaagtatcatcgaaagctatctgcctgacgaactggctatcgaagctccttttttcggcaagaacgtacagtccatgttgaagttgggacgtgctcagggagtggcgatggcagtggcattgagccgtgatattccgatcacagaatatgctcctttgaagatcaagatggctataaccggaaacggacaggcatcaaaggaacaagtagcggatatgctgcagcgtatgctgcattttcccaaagaagagatgcctacctttatggatgcgacggacggtttggcggcagcctattgtcattttctgcaaatgggacgtccggcaatggaaaaaggatatagcagttggaaagattttattgcgaaaaatcccgataaagtaaaataaacccgcaatgaaagaggctgggagtgagaaaagttataaacaagtaagtgcgaaggtagtgtgagtaccgcaggggaggtttagtatgaaaatgggaaccaattatttagcgatattaggggtgactacggtgacgacagtaatgagttgtactactgcgaaaaaggaatatatgtcttatgaattatatccggtccgtacaggaagtctgattgaaatggagtatacaccggaggcaacgaagtttactctttggtcgcctacggcagatgaagtacgtctgatgctttatgaggcaggcgagggcggacatgcctatgaaacggtaaagatgcagtcggaggaagaaggaacctggacagctgtggtaagtaaggaccttattggcaagttctatactttcaatgtgaagatcgatgacaagtggcagggagatactcccggaataaacgcccgtgctgtcggagtaaacgggaagcgggccgccattatcgactggcaatccaccaatccggacggttgggagagtgacacccgacctcctttgaagtctcccgccgatatgattatttatgagatgcaccaccgtgacttttcggtcgattctacttcaggagtgaagaataaaggaaaatatctggcactgaccgaacatggaacgatgaactccgacaagttactgacaggtatcgaccatctgatcgaactgggcgtgacacacgtgcatctgcttccttcttttgattacgcttcggtagatgaaaccagactgaatgaaaattcgtacaactggggatatgatccgcaaaactataatgtacccgatggttcctatgccactgatccctatcagcccgccactcgtgtgaaagaattcaagcagatggtacaggcactgcacaaagctggtatccgtgtgataatggatgtggtgtacaatcatacattcaataccgatgagagtaacttcgagcgcaccgttcccggttatttctatcgccagaaagaagataaaaccttggcaaatggctcaggctgtggtaacgagactgccagcgaacgccttatgatgcgtaagtttatggtagaatccgtcctttattggataaaagaatatcatgttgacggcttccggttcgacttgatgggaattcatgacatagaaacgatgaacgagatacggaaggctgtgaatgcggtcgatcctaccatttgcatttacggagaggggtgggctgccgaggcgcctcagtatccggctgactccttggcaatgaagggaaatatagcacagatacccggagttgctgtcttttctgacgagctgcgtgacgggctttgcggacctgtaggtgataagcgcaaaggagcttttcttgccggaattccgggaggggagatgagcataaagttcggcatagcaggcgctatcgagcatccgcaagtacagtgcgattcggttaattatactcaaaagccgtgggcgaaacagcctgtgcaaatgatcagttatgtttcctgtcacgacgggctgtgtttggtagaccgactgaaggcaagcatgccggacatcactcccgaacaacttatacgtctcgataaactggcacagactgtggtctttacttcacaaggtattccgtttatttacgccggagaagaaatcatgcgtgataagcaaggcgtggacaatagttataagagcccggatgcagtgaatgccatcgactggcggcgcaaaaccaccaacggagatgtcttcatgtattataaacgattgatcgatctgcgtaaatctcatccggccttccgcatgggagatgcaggacaggttcgaaaacatctggaatttcttcctgtggaaggaagcaacctgattgctttccgtctgaaagaccatgcaaatggagatcattgggaagatatcatcgtcgcatttaattctcgtcctactcctgccaggcttactattccggttggtaaatatacagtggtatgtaaagacggagtgatagatgtacgtggattaggcatacaaaacggaccggaagttattattcccggtcagtcagctttgattttatataagtaaattcagtcttttgataatcgaacagaatagaagaatatgattcagaatacattcaacatggcggggggcgtggcacgcaacccgcttgtgcgtttagctgcacccatcacggcaacgatttcagccggagaacacattgcaattgtagggcccaacgggggaggaaaaagtctttttgtcgatacgctgatcggtaaatacccattgcgtgaagggacgctgcaatatgacttttctccttctgccacccagaccgtctatgataatgtgaagtatatcgctttccgtgacacttatggggctgcggatgctaattattactatcagcaacgctggaacgcccacgatcaggacgaagcgcccgatgttcgtgaaatgctgggagaaattaaggatgaacaactgaaacaagaactatttgaactttttcgcatagaaccgatgcttgataagaaaataattcttctctccagtggcgaactgcgtaagttccagctggccaaaactctgttgacggctccccgtgtattgattatggataatccgtttatcgggctggatgcacctacccgcgaattgctgttctctttactcgatcgtttgacaaagatgtcgtccgtacagattattttggtattgtcaatgctggatgatattccttcatttattacccacgtaattcctgtggataaaatgatggtgtactccaaaatggaacgtgaggcctatctggaagcttttcgttctagggatgtagctgtttcttttgatgagttacagcaacgtatcgttgatttgccctatggtggcaataattacgattctgatgaagtggtcaaattgaataaagtcagcatccggtatgatgaccgcactattctgaaagagctcgactggacggtgcgacgtggtgagaaatgggcattgagcggtgaaaacggagccggaaaatctactttgttaagccttgtctgtgcggataatccacaatcatatgcttgtgacatcagccttttcgggcggaagcggggtacaggggagagtatttgggaaattaaaaagcatattggctatgtaagtccggagatgcatcgtgcttatctcaaaaatctgccggctattgaaatcgtggccagtgggcttcatgacagcatcgggctgtacaaacgtccccagccggaacaaatggccatctgcgaatggtggatggatatatttggtattgcggaattgaaagacaaaccttttttgcaactttccagtggagaacaacggctggcattgctggcacgtgcttttgtgaaggacccggagctgctgattctggatgaaccgcttcacggtttggatacttacaaccgtcgtcgggtaaagaagattattgaagctttctgccatcgcaaagacaagacgatgattatggtgactcactacgaatcagagttgccgggcactattacagaccgtattttcctgaagagaaaccgatgaaatggactgttgtctgaaaaataatgtttggctctgccattctgaatataatgaaggatgacagagcaatttaaaaaagatttttttaattaattggatgggtgaaccaaaagcaggacccttttcctggttctgattccacaccgattttccctcccagttgcgtgacgatactttggcagatagacagtccgagtcccgtaccgggaataaaactgttgagttttacaaatcgggtgaagatagcttcctgtttttccggctctatccccattcccgtgtcctgaacggagaatttcacttcgtttccgtctatttggtagtcgatggtgatatttccttcggaagtgaattttaatgcgttagtcacaaagttcagtaatacctgataaagtctgttcttgtcactggtgaacgtcagttcgggtaaattatctttcaggcggagttctacttgcggactagttttcatttgcatagcctgaaacagatcgttacaaagctgtttcgcattcaccctttcaggaataatgtcgaaagtttccgcttcgattttcgataagtcgaggatatcggaaataagctgaagcaacaacttgttattatcttctatgatcgtgatatactgatgcttttcttcctgctcctccgcctcttccagcatacttgagaaaccgacgatcgcattgagcggagtacgtatctcgtggctcatgttggcaaggaaggcagattttaaacgatccgcttcttcggctttctctttggctttgataagcatttgctcggtttcttttagctgggtaatatcaaagttgatacacagcatttcgatgacattatcctgcggccggtagttgcggaccaacacattcacccgtgtccacgtataacttccatcggctctgcggatacgtacatccctgcataatttcgtactttcgcctttgaccactttcgccagaaagtcgagcataacagcccggtcctccggatgaaagtgagaatggataccgataatttccggtaggggcgtgccttcctcttctcctacatttttataccagctgcttaaggcataaccattacggcttaacgcatcaaaatgagcgtatccaaccttggcataatctcctaccagttcaaagaaatttttaaattcctgaattttgttgtaggcgatggtgttttccgtcttatctacgtttatcaacagataattgataggctgccggtcatgatcatagagtgttgttattcttgttgtcagattaatgaaaccggatgttttttccgattcataatatcctttgatttttgaaaaatcatattggaaggtgaattcaacctcttcattatctctgatctttagctttatttcttcgggtagtgccggattctcaaagatattgataccaataactttttctttatgggtgatatggaacatttccagttcctttttattcaagtcaagcagataaccgtctttattatacagttcaatgccgacgggaaggtttttatagatattgtgcaggatacgttcactgttttgcagtgcctgataggcggaagccatgtggggaccatcttgagtttctgctattccgtatattttggtgtttccttccctatcagtttcctgaaagcatattgtactgcgaatccatacttccccgtggggagtatggagcaggtacacctcctcaatgctctgttgcaatttatcgaaagagtagctggtagtatggtgctgatcctcccttaggatacgtttattgaaatcttcaaaactgatcactccgtcttcgtctatcccgagtaatcgggagataaactcggaacatacataactttctgtttttaagtccgcttcccaccatcccatattcgctttattcagcagtttttgcaggaatgtgtattctttctgtttgcttgtttccaatgtctgacttgttttaactggcggttgaatattcatttagtccgtaaaaataatcatttttattgaattcttttcaataaaccatcacttttaggtattgatacctgctgattctttcgtgaactttgtagagtaacaaaatgttgtatatataaaaagatgaaaggagatcattaagaatgaaaaagatagtattacttcgtcatggagaaagtgcttggaacaaagaaaaccgtttcacaggttggacggatgtagacttgacggaaaagggagttgccgaagcggaaaaggcgggcgttacgttgagggaatatggcttcaacttcgataaagcctatacttcttatctgaagagggcagtcaaaaccttgaactgcgtgcttgataaaatgaatctggactggattcctgtcgagaagagctggcgtctgaatgagaagcattatggcgacctgcaaggactcaataaggcggaaacagctgagaaatacggagaaaagcaagtgctgatatggcgccgcagttatgatattgctcccaatccgctttccgaaagcgatttgagaaatccgcgtttcgatttccgctatcacgaagtacccgatgcggagctgccgcgtaccgaatcattaaaagataccatcgaccgtattatgccgtactgggagtcggatatatttccggctttaagagatgcgcataccttgctggttgtcgcgcacggcaatagtctgcgaggtatcatcaagcatttgaaacatatttctgatgaagatatcatcaaactgaatcttcctactgccgttccttatgtattcgagttcgacgagaacctgaatgttgccaacgattacttcctgggcaatccggaagaaattcgtaagctgatggaagcggtagccaatcaggggaagaaaaaatagcaggcttcatcgcctgtatataaattgttatacattaaaaaaataaagttatgagtaaagtagttgatttattaggagataagaccagttattatctggaccatacctgtaagaccattgataagtcgttgatttatataccttcaccggatactattgataaagtctggattgattcggaccgaaacataaaagtattgaatagcctgcaaacccttttagggcatggacgcttggcaaatacgggttatgtgtccattcttcctgtcgatcaggatattgagcatacagccggcgcatcctttgcaccgaatcccatttatttcgatccggagaatattgtgaaactggctattgaaggaggctgtaatgcagtagcttccacattcggtattctaggatcagtcgcacgtaaatatgcgcacaaaatacctttcgtggtaaagttgaatcacaatgagctgctgacttatccgaatacatacgatcaggtattgttcggcacggtgaaagaagcttggaatatgggagccgtagcagtaggagcaactatttatttcggttcggaacagagtcgccgccagttagtagagattgccgaggctttcgaatatgctcacgagcttggtatggctaccattctgtggtgttatttgcgtaatagcgatttcaagaagggagctatcgattatcatgctgctgccgaccttaccggacaggctgaccgtttgggagttaccatcaaagcggacattgtgaagcagaaacttcctaccaataatggtggtttcaaagcgattggtttcggaaagacagatgaacgcatgtacacggaactcacatcggaacacccgatcgatctctgtcgttatcaggtggcaaatggttatatgggacgtgtcggattgatcaattccggtggagaatctcatggggcttccgatttgcgtgatgcggtcattacagcagttgtcaataagcgtgccggtggtatgggattgatcagcggacgtaaagccttccagaagccgatgaataagggtgtcgaattattaaacgctattcaggatgtctacctcgatccggcaataaccattgcctgatctaggaaagatgagaaataattcttatctttgactaccagatagttaaccattaaaaaatagaattatgaagttttttattgacacagccaatttggagcagattcaggaggcgtatgacctcggagtacttgacggagtgactaccaatccttcgctgatggcgaaagaaggcattaaaggtacggagaatcagcgtgaacattacattaaaatatgtaagattgtcaatgctgatgtaagtgcggaagtaatagcaacggattatgaagggatgatccgcgaaggggaagagcttgccgcactcaatccgcacatcgttgtcaaggtgccttgtattgccgatggtatcaaagctatcaagtactttacagaaaaaggaatccggaccaattgtacattggtgttttccgtcgggcaggcattgctggctgcaaaggccggagcgacttacgtttcgccttttgtcggacgcctggatgatatttgcgaagacggggtagggcttgtcggtgatattgtacgtatgtatcgcacctatgattacaagactcaggtattggcggcttctatccgcaatacgaagcacatcatcgagtgtgtggagatgggagcagatgtggctacctgtccgttgagtgctatcaaagggttgttgaatcatccgctgactgattcgggattgaagaaatttttggaagattataaaaaggtgaatggataattgggtttgagaaactaaattttctcaaagaatttattttaaaggggcttctgacatattttatgtcagaagtccttttttagtaattttaatatagtcaaacaagataaaactaagatatcgtgtttattcatcttactttgtaggttgtaataaaactagtgatgtaaataatgaataaaaatggatttagtcgttgtgccgatatctatatcggccgtttgcgcgaggagggccgctactctacggcgcatgtctatcagaacgcccttctttcttttagcaagttttgtggtgtccatagtgtgtccttccgtcaagtcacccgtgaccgccttcgccgttacgaacagcatctttacgcatgtggtctgaagcccaatacaatttctacgtatatgcgtatgcttcgtagtatctacaatcgtggtgtggaggcgggtagcgctccttatgtccaccgcctgtttcatgaggtctatacgggagtggacgttcgtcagaaaaaggcgcttcccgtcgtcgctcttcgcaggcttctttatgaagacccccattctgaccgtctccgccgtacccaggctatcgccgctctgatgttccagttctgcgggatgtctttcgccgatctgagccatttggagaaatccgctcttgatagcaacgtgctgcgctacaatcgtgttaagacgaagactcccatgagcgttgaggttctggacagcgcacaggagatgctcgagcagctccgtaaccggcggtctccccgtcccggctgtcccgactaccttttcggcatccttcagggagataagaaaaggaaggatgagaaagcttaccgtgaataccagtccgctctccggagattcaactactgcctgaaatccctggcaaagcggctgcgtctcaacttccccgtcacttcctacacgctgcgccattcttgggctaccactgccaagtaccgtggtgtccctatcgagatgatcagcgagtcgcttgggcataagtcgatcaagaccacgcagatttatctgaaaggctttgagctgaaagagcgtacggaggtaaaccggatgaatttgtcttacgttaagaggtgcggttctggcctgtatgtgtgatttagaatcctgatatacagtgtttattggtgtgtgttacttcttaggtaacggaatgattcatggcgcaaagatggacatatttatgaaaatacgcaaacaaaaatgaaattaatttcttaaaatgaatcaaaagtcggcataacagacggaaaatgacaatatccgtgttatgtcttttttttattccaatttatgaaaaacaccttcacttctgccttatttcctgaataccagtcctcttccgatgttttcgttgaaaaaagttccctgtttcgcttgtcctttgtttgtgagttacctaagaagtaacggataaacatggggtaaaaaaacatgattttaagaaaaaagaaatcactcaatgctgggcctattaatgggacaggggaaggcgtagcacactcaaaacgctggtatgttgctttggttcggatgcatcatgaaaagaaggtttccgagcatctggacaagatgggtatcgagaatttcgttcccgttcaacaggagttccaccaatggagcgaccgtcgcaagctggtcacctccgtcttgcttcctatgatggtcttcgtacacgttgaccctagggaacgcatggaagtcctgagtttttctactgtgagccgttacatggtgatgcgcggcgagagtagtcctgctgtaattcctgacgagcagatggcccgtttccgtttcatgcttgattattctgaagaatcgatcagcatgaacagtgcccctttggcccgtggcgaaaaggtccgcgtgattaaaggccccctgacgggtcttgttggcgaactggttcatgtggatggcaagagtaagatcgccgttcgcctgaatatgctgggatgtgcctgtgtggatatgcctgtcggttatgtagagcctattatggcggctgtttaaggcgagggatatggatgctgttattttacaggaaaacatagagggtttattaaatttggtacgcatgctgcttcctggtggggggagtgcaggctgcgtgtatctggatgacctttccgccttacaacgatccatccacaaacagataaacgatttatattcacaacgggggaagacaccggaacaggatgctaccctgtgtttggccatccttcagggatataatgtgtcgatgtacgccaattcggaagacgaggatagaaaacaggctgttttgacccgttctctgtctcttctcgatgttcttcccccttctcttcttaagcaacagttatctgccgtctgtcatgggatgcaggaactgtgtgaaatcaactgaaacttttttatttgtcaatgaaaatacaacgactttttagcattctactattttgtttgatgctgggaagtggctcgcttatggctcagtccatgagtgactcacaggtactggaatatgtaaaagacggcatccgccaaggcaaggaacagaagcagcttgcttccgaactagcccgtaagggtgtaaccaaagaacaggcaatgcgtgtgaagcagctatacgagcagcagaacaatgtaaatacctcgaaatcaacgggcacggacatcaacgaatcccgcctgcgtgaagagactaagaagaatacttccgatatgctggaggatcatccgactactcaggaccttgcccgtggtgatcaggtcttcggacgtaacatcttcaatacccgcaacctgacgttcgagcctagtgtcaaccttgccactcctgccaattaccgtcttggtcccggtgatgaagtcatcattgatatctggggtgcgagccagaacacgatccgccagcaaatctctcctgaaggtactatcaacattcagaagatcggccctgtcaaccttagcggtatgacagtctctgccgccaatgactatctgaagaacgccctgaataaaatatataacggtctgaataatactaccgatcctacttccgacatccgtctgacgttaggtaatatccgtactattcagattaatgtgatgggagaagtcgtacagcccggtacctacgccctttcttccttctctaccgtcttccatgcgctttatcgtgcaggcggtgtgagtgatatcggtagcctccgaaacgttcagttggtacgcaacggaaagaatatcgccaccatcgacgtctacgaatttatcatgaaaggcaacacacaggatgacatccgccttcaggaaggtgacgtggttatcgtccccgcctacgatgtcttggtaaagatcagcggcaaggtaaaacgccctatgcgtttcgaaatgaagaaagacgagaaccttgccactttaatcaaatatgccggcggctttgaagccgatgcctacacccgttcattgcgtgttgtccgtcagaatggtgaggaatatgaggtcaacacggtcaaggatatggactacagcatctacacaatgcgtaacggtgacgttgtaacagccgaagccatccttaaccgcttcacaaacaaactggaaatccgtggcgctgtctatcgtcccggtatctaccagctcagcggtaaactgaacacgatccgcgaacttgtccatgaagctcagggtctgaccggtgacgctttcctgaatcgtgccgtcctttatcgccagcgtgaggatttgaccagtgaagttgttcagatagacatcaagtctatcatggacggtacttccccgaaccttgccctgatgaagaatgacatcctttacattccgagcattcacgatctggaagatcgtggcaatgtcacagttcacggtgaagtcgcgcaccctgattcctatccctatgctgataacatgacacttgaggacctgatcatccaggccggtggcttgaaagaagctgcttctactgtccgcattgatgtgtcgagacgaatcaagaatccccgtagtatcgcggataatgatactatcggtcagatgtataccttctctttaaaggatggttttgtcatcgacggtcagcccggttttatccttcagccttatgacgaagtttatgtccgtcgcagtccgggttatcaggcgcaacagaatgtagtcattgatggtgaaatcctttttggaggaaattacgccatgaccagccgtgaggaacgtctttccgatctggtgaataaagcgggtggtcctacgagtcttgcctatcttcgtggtgcaaagctgacccgtgtggcaagtgcgggtgagaagaaacgtatgggtgatgtgattcgcctgatgagcaggcaattgggtgaagccatgattgactctttgggtattggtgttgaggatacctttacggtaggtattgatctggagaaggctttgactaatcctaagggtaatgccgaccttgtcctacgtgaaggtgatgtggtctttatacctaagaatactaatactgtaactatcaatggtgctgtcatggttccgaatacggtttcttatatgaagggaaagaatgtggattattacctgaatcaggccggtggctgttctgataatgcaaggaagagtaagaagttcattgtttacatgaatggtcaggtgacgaaggttaagggtagtggtaagaaacagattgagccggggtgtgagattattgtgcctagtaaggctaagaagaaagggaacatagctaatattttaggttatgctacttccttcagttctttgggaatgatgattgcttctattgctaatttgataaagaaataataattaatgttattatgaaggaacaaaaattagacgaaaaatttttttttgaatctactgacttaaaggaagatgaaaaaactgttgattttatagatattttacgcaaaattataactgtccgcggaaccttatataaatccgcttgtgtaggggcaattattggttttgttattgcattgagtgttcctgaacaatatacagttaaagtaattctttccccagaaatggggagtacaaaagggggaagcggtttaatgggaattgcagcatcttttttgggaagtggtgtgacaatgggggatggtactgatgctttgaatgcttcgctttctgcagatattgtaggctcaaccccttttttgttagagctcttatctatgaaagtgccatatcctgatagaaaaaatatgattacattggaagaatatttggatgaacagttttccccttggtggaactatattattggaatccctggaatgatgactgatggggtaagatctttgttaggctatgaagaaacgactattgataaagagagttgtggcactattgaattgacaaaaaaagagagtgaaaaactcagcgttttgaagaagaatatcttggcgacaatggataataaaactgcaataactagtatatcagtaactttacaaaattctaaggttactgcaattgttgcagattcagtaattcataagttgcaagagtatattattaattatcgtacttttaaagctaaagaagattgtatctatttggaaaaactgtttgaggagcgtcaagtagaatattatatggcccaaagaaaatatgctgattatgtagatacgcatgataacttgatccttcagagtgtacgtacggaacaagaacgtttgcaaaatgatatgaatttagcatatcaagtatatagtcaagtagcaaatcagttggaggttgctagggctaaggtacaggaagaaaagcctgtttttgcagttgtagagccagcagtggtacctttgaagacatcaggcctagggaagaaaatgtatataatactgagtatgtttgtatcttttttttgtactatgggctggttattgttaggtaaagagattgtgcgaaatttgaaagatgaattgaagctataagtagatgatttggttaatatgataatgattggctaatattgctttatgtttttgatttattttatgctgtaatattactatcttataagcaataaagtattacgatggattctaataataagcgtattgcgaaaaatacaatgatgttgtatgttcgtatgctgtttataatggtggtaacgttatatacttcacgaattattttaaatattcttggagtagaagactatggtatttatacggtaattggaggaattgttgcgcttttttcagtcttttctagttcactatctgcggctattagccgctttataacatacgaattaggtaagggggatgaaggagatctaaagaaaatattttcaacagctgttattattcaaatagctctagctattttcatttgtttgttaatggaaattggcggagtttggtttctaaataatagaatgaatattcctgtagaacgtattggagcagctaattgggttttacaatcttctatttttacatttatggttaatcttgtcagtgtaccatataatgctgctattattgcacatgaaagaatgaaagcctttgcatttatcagtattttagatgtaatcttaaaacttcttgctgtttttacattatattttggagaagttgataaattaattatttatgcattacaattatcggtgattgctttgataacccgtttggtttatggtttttattgtaataaaaaatttaaagaatgtcgctttgtttttatttatgatagaaaaatatttaagcaaatggtacagtttgctggttggaatattataggtgcttcttctggtattcttcgcgatcaaggtgtgaatgtattattgaatatttttggcagtccggttattaatgcagcccgtggtattgctatgcaggtttatgcggctgcttcaagttttgcgggaagttttattacagctttaaatccacagataacaaagtcttttgcttctaatgatcgtgcttattctatgaaattagtatttcaaggtgcacgtttttctttttatttaatgttgattctttcgttaccaattttaatggaaacacattctgtgctttctctttggcttggagttattcctgagaattctgtgacatttgttcggttaatgcttatatgtgttatgacagagtctatatcatttacaatggtaacattgatgcttgcgacaggcaaaattcgtaattatcaaattatagttggagggtgccaaatgttaaattttccattatcttatattgcgttgaaattgggttatcctccggaagtaaccttaattatagctattgtgatagctttttgttgtttattgttgcgtctttatatgttgcataatatggttggcttatcagtaatatctttttttcggaatgtttttctgaatatattttctgtgggggtgttttcttttttattacctttttttcttctacagataatggaagatagctgggggcgcttttggataatcagttttatatgtttactgtctacactttgttctattttttttgtaggttgttctcaaaatgaacgaatttttattttggaaaaagtacagaaatttaaatttaaaatattttttaatgaggataaataaaaataagacaaattgctgtggttgtactgcttgtgaaagtgtctgttcacataatgccatcagaatgaccccggattcgcttggctttctttaccccaaaatagataatgatttgtgtatagattgtggtttatgtgaacaagtttgtatgtttcatgaggattatgataaaactcaaaatttatctgctccgatggcttatgctattcgtcataaagacatgcatgaagtagaaacatcacaaagtggagctgctttcattgctttttctgattgggttttagatcaaggaggtgctgtttatggtgtagggtatgctgaacattttaaggttattcataaaagagccataactaaagaagaacgtaatgaatttaagggtagtaaatatgtacaaagtgatgtaaatacaacctttaggcaagtaaagaaggacttgaagaatggtttagtggttcttttttctggcactccttgtcaaacagcgggattatcgtcatatgttggtgaaaagttgcgtaaaaatttatatttgatagatattgtttgtcatggtgtgcctgctccgtttctttgggatgactatttgacgtatttagaaaaaaaagagaatatgcctttggaggatgtaaattttagagataagagatttggatgggcgtctcatgttgagtcttttcgatttaaaaattctcaattttataagtatatgcgtacatatgcatatacattttatacacacatcatgttgcgttattgttgtggttcatgtccttacactaatttgcagcacccttctgatataactatagctgatttttggggataccaaaaaacgaatgcggcatttttagctgaagataataaggggtgttcactcgttttagttaatacggaaaaaggtaaggaatggttgggtaaaataaaagaatttttaatttatattcctatagaacttagagattgtatgcaacctaatttgcaaaatcctactactttacattccaggcgggctaattttgaagaagattatgcaaaacatggttttgattacgttatgagaaagtacgggtatatagggtggagatatcatacaaaatgttttataaaacgatttataccttattcaattaaatatagacttaagagattgattaaactattaaactgatgcaatttaaagagaaggaaaaatcaaaaactcaatgttttaataaaaaagtagctcttcttacttttcatcactcctttaattatggtgctgtatgtcaaacttatgcaacttgtcgtgctttgcaaagattagggtatgatgttgaaataatagatctgcgtattgtggaaaaatactctttggtacagcgtttgtttggaatagggagaatgtttaaattctggtattttagatatcgttattatcctcaatttactaaacgttattataatacgatagagttgaagaaatctccaccccaagcagatatttatatggtggggagtgatcaaacatggaatccgcttattacaaaagatttattagatgcttttttactaaaatttggaggtgcccatatagtgcgaattgctttttctgtgagttttggtgaatattcatggatttatagggatgaagaagcacttaataatataaaaaatagtgttggcgagttttcgcaaatatctgtaagagaggaggatatggtgtctttgtgtgataatttatttaatttaaaagtggataagacattggaccctactcttttaggtacagattttttagaactaaccggacccattgtaggtaaacatactttagttagctataaattttttatggatacttcttattgtgattgtttaaagacaatagctaatatgtatggtaagaagattgaattgttagggaagctaagacctgtacagaaaatgccatatacctaccctcaaggagtaattggctggattagagaaattgctgctgcggatattgtttttacggattcttttcatggagttgcattaagtattttatataaaaagaattttatagcttttattggtaatcccttgagaagcggaaggattaaaaacttgttgagagaccttgaactggaagatagattgtatgaaaaatctacctatgagttggaagatatagtgaaattatgtgaactgccgattaattatgaaaaagtagatttgaaattgaatgatttgcgtacgaaatcattagatattttggcacggataggtttttataataaatagactttgaaagaaaaagagcaattgatatttttatcttatttgaaagaaagtataatatttcttttgttaatcatctctattccattaggagtgttgacacaaggaggagttgatacatattgggtaattattccacttgtatttttaatgcaaggatatttgatattttgttttaaaaatacccaaatgcttattattcttacattatatgtttttatttatttcctttatttattgccttatttttatggggggatacaattgtcgcagtattcacaatttcagaatagattgtattttagtaatattttatttctgttttatttattttacgcaggtttacttcttgcttcaaaaaaaaaggttgaattatcagggattaaattgatagataaaatacatataaagacttctactatagggaaatctttttatcttttaatgttgttctttttacttgttctgactcttcgccaaggtgaaaatgttttggctaatacatctaattcatatgaaatttataaacaaaacttggataatactaatagtttaccattatttatggtgttgttgctattatttttcccatcaattattaatagaaacaaaatagggaagttatgttttatggttgtgaatatatgtatggcgtatttttgtattactagaggtatgcggatgattttagctcctttaggtatgttgattttttctttctattttgataataagataaaaatacgttctcttctattgctttttatagcaggctttcttgttttagtgttcatcaatgctttaaaaatgaatatgaattttcaagcacaaaatattctatcagaaggaggagataatgattttattatctcccatcatgcggataacttatatgttgcttcggctggaatagggctagtgaaacaggatattataacattttgggatcgtgtgatgttaaatattggttttgtagcagaaacattagttcctccaagctggttatctaataattttaaatatcctcatattattacaaattttttgtcaacaggtggaggtggattatgtattgtgggtgcatatttaatgtgggggtatgttggagtaatatgttttggatatctgttagggtgtttcatttgttcgtcatataaaaagaattcttctttacaggcattgatttgttctgttttattggttttttttcctcggtggatttcttatgattttcatattattttgcgtttttcatttttagcattagttctctattttgtattatcatggccaataaagaaaaagtacttgtagtcagcactacacctttttttggtggaggagaggcttttattgtgaatacattgagtagaataaatagagatatttattatttggttagatgtaaagaattatttgattatctgccttcttccaagatgaaatttttggctagtgattctttggttgggcagattaaggaagttaataactatactaaagagattaaagcagactgtgtgctattgaatggggggagttctatctattttactccatttataaattgtggtttgaagattatttatagacatacaacaaattatagtgtgtctaatattcttaaaagatgtctttatgtttttttgttgcatatttgttatgcatttgcgaatcgtattgtacatgtatcgtcattttcattaaatgagcaaaagctttttcttcgtaaggcttgctgtattcatcatggagtgaagatgaatattccatatcataaaaagccgggagaaggaccaattcgttttctatttgttggacggacagaagcagcaaaaggtatacatcttatagtaaatgcttttaagaaacttccagaaggaatggctgttcttgatattgttggtagaggagaactcgatgatttcttattgaaaaatgtttcttcttctatcacttatcatggatttcgtacagatgtagataaatattataagaattcagacgtttttattagtttacctgttcatgaagcatttgggttgacttttattgaagcgatgcgtcatagtcttcctataatatcatgtgacactggaggtatttctgagattgtgcaaaatgaagtaaacggtttattaatatcacgtgatttggaatctatatataaagcaatgcttcaaatgtgtactaatagacatcttattacaatattgggagaaaaaggatatcagattgggtgcacaaagtttgatattgataaagttgtttcctctatagaagaaattttgtaatatgcttattggaatagattttagtttggcaactagtacatgtcgcggtatgggacgttatgttcgggaaatagttagttgcttaatgaagttagatacaaataatatatattatttatatacacataatccaatttcctttcatttgccttgtaattttattgaaaggcgtattttgtgttgtaatacaattattgctgagcaactatatttaccaatagttgcataccgagatcatttagatgtattgtggtgtcctgggaatacttttccattatttctttcttcaaaaattaaactagtcgtcacaatacatgatctaattttctatttaaagtttaatgatccatcttcaattcgtcagaaaattggacgattttatcgcagtttggtaacttcttgcgggaaaatgaaaataaatagttgtgttactgtttctagatattcagctgaagaaattaaattaaaattaggtttgcaagatatatatataacatataataaaatagatgctttttatcagttggtacaaaatatagatagacctatcaaaagagaaaatttttatttcacggtatcaggtgatgctccaagtaaaaatttatcgatgttaatagatatatttcaaggagaattatctgatgagaaattaattattgcaggcattcctaatggttctatattgagatctaaacaaaaaagtaatatcatatttttaccacaagggatagaggataaagaactaatacgatattacttaacatgtaaaatgtttgtttttctttcgaaatgtgagggctttggtattcccgcattggaagcgattgtttgtagaacccctatggtttgttctaatacaacttctttgcctgaagttgtagggcatttggggatattggtaaatcctaacaataagagtgaggtaatagatgctttgcttaattcgagttataaactgaaaaatgatgaagtagaaatgcatatacaaaaatatttaaaatggtctgagtcagcagagataatactgaaagttttaactaaatagagtaattacaattttatgaaaaaagtgctttttatatcttcacgtcctatatatcccgttataggaggtgatcaaatacgcacatctcaacaattagaatatttagtgcaaaggtatattgttgatgttatttatttgagtgagcatgtccttgaagatcaaacaaagaagtatttaccatctgttagaaatgtaaaatactttcgtatttctaaggctagaagctattttcaaacattatgtttcttgtttaataaattgcctttgcaagtgaattattattataataaaaaggcttataaatatattgctacacatttgtgtgattatgatattgtattttgcaataatataagaactgcagagtatgttagaaatgctcagaatataattaagtatatagattttgttgatgctatatccatgaactatgataaagcaaagcagttatcacatggattgaaaaggttaatatatatgattgatagtaagcgatgtcttgaatatgaacaattgattatagaaacatttgatagttgtgctattatatctgatatagataaaaaatatataataaaaaatgttagcaaaaattcatgtcgtcggaaataaagtaaacgttcctgatagttcacgcatatcaaaacatgaacattctaatgtgattgtatttattggaaaaatgagttatgatccaaatgttatagctgttctttattttgtaaataatatttttccaagtctttgtgttgaatttcctaatttgcagtttataattgttggtgctcatcctgataagcgaatccaaaaattagcaagctatgataatataactgttactggatatgtggattcaattgagccattttatcaaaaagctgctattgtaatagctccaatgcttactggggctggaattcaaaataaaataattcaagcaatgtcatatggttgttgtgtgatgactacttctattggggcagaggggctgaacatcaagaacaatgagattgcagtatttgacggagatcagcagatgaaagaaggacttttgtatcttttgaataatcctgaattacgtcgaaagatggggataaatgctaggcagtatgttattgacaatctgtcaaatgacattattgctcatcagttttgggcatttatggatgatcctttgaataaatagtagaagaataacactttgttggtaagcactcaaaaaagggcagataattaaagattataccttcgttacggacaaaaattaaaattatgtatagcagcgaaaatttagagcgattttattttcagtatcaaaacgaggtattgtcaaagggtgagtgttttcagtcctttcataaaaggaataaagtaccctataatatctttcaaaagtggtataaggatactcgtaataaaatagtcgaggtaaaggttgacggtaggccggaggagccgtcttctagttatgctctccactcccttcaaattccatcagatactggtaataaagaaagggagttcgcgtctggtttgaagttctcatgagtaacggattgcacttgtctcaaaagaatttaaactatagtgatctggttagtctgatagagaaactggagggtttatgctaagcgtaaccggtttgaattatctctattatgttcgtatgatttttccgattttttttaatgctataaatcaaaggtttatcgatagttggaatgcagcattatattcgcaatgaaagaggtgttgttgagttgggaaaccttcttccataaatttgtcaaggcgtaaatcagggaggcgagaggaatgtggaacgacttgaaagagttatacgccaatgaacggcgttatgacgaggcgggtcttacctcagaggaacggttgcgggaaagacaaggtttgatgaccaaagagatccttataagaatctgcggcagactggactgtgaaatgtccaaggattcagattttcgaagtccttattataaggagatgtttgactatctgaatcattttgggaaagagatttttgcttatttggaagacggggaatttccgatacacaataatttggctgaacgaactatccgaaagtttagcgaaacaatgctttacattatggaagcgatggtggagcggaaatggcagccatgtatgatagtatgataggaaccatgaaatttcaaggtagtccagtctgagaattcattgggacatttttttatttttaatagtgtaaagattatctgaatttaatctccgataaaatcttattggccactggctaatggtaaaatcaaaattaatttttaacaaaactcggtttaggaccctgtctttgtcttgtgccttaattaagcgggaggccctaaattgagtgcttacaataggttgtatattctcaaaacaatttctagcgttttatgatgttgtaagtgtacttttaaactattcaatcgaaaaatatgaatatcgtatttgttttattagcttttagtatttctgcttacattgctaggcttattattccatgtatcctgttaatatcatttcgcaaaaaactgtttgacatgccggatgagagaaaagtgcataaacgagcaataccacgtcttggtggggtctctttttttccgacgatcttgctttcctgttgtgcagtccttgtgattcgaactttgacaggatatgaaatctctactttgctggcgtcctatattttgccggaattcttggtattaatatgtggcatggtgcttttatatttaaccggtattacagatgatttggtaggtgtgcgctatcgtcagaaatttattgttcaaattctttgtgctagcttattccctgcagtgggactttggattaatgatttatatggtttgtttggcattgactttatttctccatacattggaattcctttgactatactgactattgtctttataacaaatgcaataaatttaattgatgggattgatggtcttgcctccgggttaagtagcgtcgcattgttagtcttcggatttctatttatggaaaaaggattgtggatctatagtatgcttgcttttagtacctttggagtgctcgtacccttcttttattacaatgttttcggtagtgcggaacatgcccgaaagatctttatgggggatacagggagcctgactttaggatatatactgagctttttagcaataaaatatagtcagaatacagaatctattcctgttacacaaggggcttttgttatagcctttagtactcttattgtccctgcatttgatgtggttcgtgttgttatagttcgtatttataatggtaaaagcccatttgaaccggacaaaaaccatattcatcatcaatttttggcaatgggttttacagtccgtcaggctatgcttttgatacttttagtttcttgcgtttttagtggaataaatattttactgatgccttatgttgataatacattgatgttgataggagatattgtcgtatggatagggctaaacctgtggtggagtaatgtgagaaggaaaaagataactgtctagtgtaaatctgatattttttcgttgttttgtgaaaaagataattgatatggaggattttgaatcgtccgcgtcgtttcggggaatcacgttttgtgtggattgccaatagtgaaggtagcggtcaactttgatagtgagagttgtacattgggagattggaggattgaaaaagtataaaaatgtagaatacaaaaggtgagatgatataataataaaagatttgtcccggcagttttctagtcgggacaaatcattgcagagcttgatagttgtgatagattttactaacctacaataattccctgtactcttctacacaagggtaacaggggcattccttatgaggattcaaatcatgatgtcctacaatcaacgcttttggaaacctctttcgtaactcacgaattaaggctaacaacgatccccgttgctctagcgtacgtgtgtctttcgcttgtccttctgcattcagtcctccttcgtaacagattcctatggaatgtgcgttatgattccggcaatgtgctccgactttctctaacggtcgtcccggatgtatttccccatcacgtgtgatgtagaaatggtaaccgatatcacggaatccccgatgtcggatatgatcctgtcggcaagcctccgccgagagggattttccctccggcgtggcactgcaatgaatgataatcagtgtgatggtccgcataagtttacatacagctttgtactcctatcaaaccacctacagcagtagcgacagtgatgattactttgataatgaaactccaaacggaacgggatgatgaattactcatagtttttgattttaaatgaaaaaaatattgatttttaatgagtctttagccatgataagctaaagactttgcggggttcagggtatgacttaaacagtcgggtccggtgcttcttcgtctccttcgtccggattaggtttcggatcgggagtgttgcctgacccggaacctcctccgggcgttgtcggtttctgatactccgcctgttgtttcagttggctgtcgagcttcagattggtcgttgataagtttccagtggcacgtgctttgagccgcatacctgtgatgttcttctccaatgagaattcttccagtgtttcggcagccttgctgcggattcctacaccgaagatggctagatcatcaattttcacacttttgccgtcgagcagcagttccttgatgcagtccaccatatcagtgagcacgcctttgatcaccccactggaatacggtgaattgtgtttcgacatgtgttcggcaagtttggcaaggtcgaatgtctcgtcgcttaccgcccgggcgaaccatttgcccgcattcaagcctttcttctgttggttctgataaattttgtaacgaatcataaaataataattttaaagagttaaacatactttcgtgaggatttctccctttcgatgacacaaagatagtatgctgtaactcggaaaaatcggttgtatacagtgacagtcggtaatgtgcaattgttgtcagttatagtctgttagtaagcccccgataaagtacccgtataaaaaagaatcgctatagcaaatcgaacaaagctatagtgattctgtatttatattcttgtttttcgttagagtattattagagttctttggagtttcccgattcccagcaatggggtagcagctcttttaggtctttctccttgttggctgcataatacggcaatagtgcaatcacctccgtgagccattcccgggggttaatgttggaggctttgcatgatgccaagagcgaacagattatggcagtgttctgcgcggcttcatggtttccacaaaataagaagttttttcttgataaggctatcggacgaatcgcattttcggccagattattatctattttaagcctgccgtctttcagataattcctcatacgtggccaaagttgatacgcgtaagcgatagcttgccccatccggcttttaggaagcactttcggataggctgtttccatccatttttccagttgctcaagtatgggaagtgcctgttcctgtcttctaagcatgcgttgctcataagtgagttcctcctggtcggcaatctgttcgatccgatagagttgctgtatttgagccagaacatatccggccagggattcattctcttctttggcaacctcgtaatgtcgccttatgtgggcaaggcatccgacaaggcacacctctttcttaccctcaaagatgttgtaggccgcatagccgtcactttgaagatatcctttgaaggtttgtaataatttccaggctgtttcctgtgagcgggaaccgtcatcataatgaaagaagaccaatccatccataaccgccctgactatccacaagtattccttaaccgctttatgattctgtttgttgataaccggtaatgtcgtttcgtccacctggatatagtcggccttcaatacctgtttcttcaactcttcatagagaggtttaagtaattcacaggcaggtttgaaccacccctgaagcgtgttttccgagatcttcaggcctaaatggtgaaactcacgcacctgacgatagaatggtacatgatattcatatttttgcaagaggatttcagtgagcaggctggcaccgggaagtcccttgtagataggcaatagcggaagaggggctataataacactgccctgatgcccctgaggcaaacttatattgtctttcaggccatacttgggacgtatgatctcttttacgtataatttgcccggttcaaattcaagtgtacgtgtgcgttcctcgcctatgcgcttgtatttatccggatcgactccttcgggttctatgacaatctccactacaggaaggccatccaacatgttgcggttctgacgcactttctttttgggagtcgtcgagcagacaggttcttgggctgcggcttcttccggtatttcgtgttccaacggctgaacaggtggatcgaacagtgatagctggttcggatccagatgggctaatttctcgctcttacggccgaataactgacgatttaaccaggctacctgagccagcagttcctgaagcttattttgcagctgttcgttctgccgggtcagacgctcgattgactcagactgggagctattagcctgctggagtgtggccaccaaaagttctaatgtttctgtctgagtcattcgtcatacctgttttgaacaatacaaaaatacagaaaagcaaccgtataatcaaggtttcacctgctgtttttcagtactgcatgtcactttttcgtaacgctttcagacgtttgagccttttggaaggttcgtcgttgattccctctaccatcagaaccaggtcacgccactgcatagggtacgacttgctttctttgtcataagagggaaggcggaaagtgccttcttcaagtcgttttatgtacaaaaccagtccgccatcttccgcgtgtagcagtttcattgtagtgcgctggcggttgataaagataaacacatcacctaaacggacatcatatcccattttatcatgaacaaccccgcataatgagttcatacctttacgcatatctgtcttacccggacagagaaagtagcgcatcgtgtcattcaggcaaaacatggcgattgcagagttgagtgagcaattgcatggccgcctgggattcagccataccactgaagtgggcgataataccaccggggaactctatccggatctcacccgtttgtatagcgccactatcacaggcagagtgggaagcaggtgaagaggtgaggctaaccggtgcaaactcctctaaagaggaagaatgcctatccatatgataacgcctcgataggccaaactttcctttccaatagtaaaagcttgattcggtataggcttcatttatacagaagtcttttatcgtcaaaccgctacgctgttgacgagacaggatttcaatgaattcttctttactcattttttgcatagtcttttttctggcaaagatcgagacttaaagatacaaagacaacgggtactttatcgggggcttacgtctgttattccctgataaaatgtaggtaatgtgaatatattttgttacttttgtgactgtaaaacagaaatttatttgtcatgatagaattcaaaatatgtgcttatggtcgcatggaactggcacagctttattctcccgaacttaccggcattgctgcttaccgcaaaatgaataaatggattgtccgctgtcccggtcttcaggaacgcctgtccgatttaggttatcagccgcagcaccgttcttacactccgttggaggtgagggcgatcgtggatgcgctgggagaaccctagctaaagctatgctttacgacttctaaagcatagctttacggtatctaaagcggtgctttagcttctacaaaacgttatttccctatgacgcaaagttatcaaccgatgcaaaaatgcacttttacggggcatccctaacacacgcacacacgtgcgcgtacgtaagtccccttttctttcatgacaaagaggcccttttttacgagacgtctcagccaggagagtgcggtgtttggtttgattcccatagctgtagcctgttccgtcaactgtgtacgggtgaactcgtcacccagcgcatcgaagaaggcgtcacggtcggcattggccctgtgggggatttccgaagatggaaggaaagataatatatgcgtggcatgccgatagagaggctttacaagtccaagaacagctttaaagtcttcaggagtgatagttatatcccaacgggtaataatgccgtccttgacgttatctgtgggaatttccttgtccggaacaggagcgtatctgtcagaactcttaagctgatagggttgggggatttccaacacccgtaacatggctatcgttgacatgatgcggcagatattgacagccagacgggctatgaaacttctcatctcgttgccgttggcaatgtccgaacggaaaaacaaatcggagaagagagcgttgaattcctttttctgctcgtcggtgaggcgaagcgtatggatgccgtgttctttcagtatatccagctttagttgccaatccctgcctatggacctgaagatttcgtccagatctatctctccgcacgcaaattggtcagcccatgtatagatgccatgcatgtagtagaacagttggcgggagaaaagtccgttctccgccgacgggatgagggctctcacctgtgcgggtgtccccgaaagtaggacggcaagaaagattctcttcacttcccggtattcctgatcggtacgtcggttgtaggacagtctgtcatggtcgaaggctttgcggagcgtgtcgctccaatggccgtattcggaactgatggcggaggcgatggtgtccgcttcggtttcgcagatgagtcctgttccgttggcgtccatgatattttgcagaatgccggtgccgctgttgttgcccgagataagaaacattttgttgggaggcatctgaggtgcttctgtattgacacgctctttgcccagcaactcatagtttttcttttctttccggtaggctttcatttcttcgtccacttgttggcgaattttgtcatgaataggttccacgagcaagcggataagtgaaagtccgctttttcccgaagcaggaggggctacaaagaaggtttgcagacaaggagactggtattttccggaataggaacatctcacatagcgttccatcgtagctcctagtgcggtcagtgctccgagcaagagtatgtcccgttgtgtgggagaagtggcatagctcataatgagcattaggattttaggccagtctgcttcggggaaagtaggcaggggttgtagaggatcactgtctgtcgagagttcttctggagcattggtgttttcgtcgttgtcgttttcttcctcttccaccttattatacgcgcgcctgtgtgtgggaaaattgtagggtgcatttagtgcattttctgcattttttcggctgttcataacttcctcccggcagattttcactcctgtcgattctgcgagatgaaaagccgttcccagatgtatttctccatgctgctttataagggcgttggagaacattcgttcggcatgctcacgctgatatttggcggatatccggcacaggcggtgaaaaaactcgcgtcctgcttcgccacagtctgttgcgatggcgaatgctaattgtacgtactcggcgtaagagggtgcaatgtcggtacctgccgtttcgactgcctcagtgatgaggcgtaaagattcaatattggtcattttcttaatggataattgataatagatagttcactgttggttattcaagattgactgttcaatactctctgaatagtgcttgtgggtcgtggctgaggaaacaggctcttacgatgtctttgccggaggtgtctacggcttttggcggagtttctgtggagtcgttcatttctgctccgtaggttatttctatgtattgcattgcccagtttatgctttcttttgcgttccgtgtctgatcgtctgcgtaaagtttgctataaggtacgaatgctttcacgccccggccgctgggactgatgaatgtaagtatgggacagaggaaagggtcgtcgaacagtgtacgacgcatttccacagctttatgataggagtcgaggttatctatatctaccactacgagcccggaaggcgatgcgaagaatttactactccggcggatgaatatgccgcatggggttacgtaggggagtaaagaggcttttgccattcgcaggtctccggcacttcgcacttgttcggtcagtgctttgaggttttcgttgcaggtgatcatctgatatacctgttcgaccgaaacttcgcagaagggagtgagtgtggcgggtgtaacggtttgtccttgttcgttcctgatgggagcaatcgggggcatgaaataagacattctgaaattgtttgtcataacatttatcgttaattcttttaataatgcggttctgtttttgaaacgcagcgcaaaattaggacaaaatgatataacggcagttcggacatatccgaactaatgtgaatatttttataacaactaaattattattaacgtttaaaacaagaaaaaatgaaaaaagagtatcatcattttgcattcggcctttttatcgaagaggtacttaaatgtgagaaagtgggtatttcagccatgtgtcaagctataggcatgagtaagggaacttacgaaatgctaaaaaaagggatgataagtgtttgaactattacgagcgtatatttaattattactatgatacgctcacagaagaggagtttctgaagaaaatgcatgagtggtcactgcggtatatccggtataggaagagacaggaggaagaaaaagaatccgcacggaaattctcggatcaataacggattattcggctattgataacagtcaggcacggatttcgcggaactacacgttttttaattactcaactctgaaaaccgtgtaatccgcgaaatctgtgcctaaatgataaacttttgttaccttatttcttctccggtagtgtaacggagaagtttgggttaggcgtgtgctgtgcaaagattactgccttcatcttttctacaatctccggatgctggtcggccacattgttgtcttcatgaatgtccgttgccagattataaaggaaaggtatccctttctttactaccatcttccagtctcccatgcgtacgccaatctgatttgtttcattaaattcccagtaaaggaagtcatgttccttctgctttttctttcccagtaatgtcggggcgaaggaaatgccgtcgaagtaatctacttctttgtctttgttcgcatatttctttacgtaattcttttcgccgatgatctcgcagaaagtaggcatcaggtcgtagaaagcgcagatgtggtcgttcactgtacctgcaggtacacgtcccggccagcgggcgataaatgggatacggatacctccttcatagcattggcgtttcaagccacgcagtttaccgtctctgccgaagaatgtaggatcagctccgccttcttcgtgagggccgttgtcgctggagaaaatgaccagtgtattctcgtccagtcctttctctttcagctttttcagtacttctccgacgtagtagtccagtcgcgtaatcattcctgcaaattgtgcgtgtacatgcgtgatcgcgttgtatcgcgatccttcgctgcctttgtagctcttgtcaggattgaatttctctttatattcatttaagatagagtcttccggctgaaccagttccgcatggggcagggtataagtcagcactccgaagaacggttgtttgccgtcctgctcatccagccattccattgctttctggtgaatcatatccgccgaatattgcgggcgtttttgataatcggcaccatacatcggatacttgatgttctcgtccatgatgacacgtactacgcctgtgtcgcctaatgccttgctgtagcgattgaggaaattaggatagtaaaggtgggcctggaactgacagatgtagccgaaatattcgtctatcccgcgtttgtccggagtggagcaggaaccttcataacctcccgcccatttgccgaacataccggtggtatatccgttctctttcattatctcgggcaggataacgtgatcggggtcgtaaggatgctgaccgactactgcatactccttgttgttgccatacattactgtgggagcgttcgtccaatattccttgttgccccgtacttcgcaatgtcctgtatgctgccctgtcataaatgaagctcgggaaggagcactgacgggacttcctgcgtatgcctgtgtgaagcgcataccctcgcttgccatcgcatccagatggggggtgcggatgaatggctgaccgtagcatcccagatcgccatatcccatgtcatcgcagaggatgaagaggatattcggctttgtgttgtttttctgtccgctggcagacagactggaaagaataagcgtaccgcttactaaagaaaataatttgtagttcataaaaataatgtgttaagaaatttatatattaggggttttattgattaattgtttttgatgtctctctcttatgtttctctttatattgagtcggtgtttcgcccgtgtactgcttgaaagtcgtgctgaaataacgggaagtagtgaatcccactttctccgcaatttccgtaaatgacatttccgtgccggtgatcagtagaattgcctgctccatccggaacttattgatatagtcattggctcccatctccgtcagtgccttcagtttgttgtaaagagaggcccggctcatgccgatttctttgcagataaaaggaatatccaatcggctactgtccaaattctcttgaatgatcttgttcagtttgagcaagaacgtttcatctgcctggctgaaggtgctttcttccggagcggggatcagtcctgcgttcagatatctcttcttggtatgttcacggttttttagtcggttacggatcagttccatcagcatttccacttcgaacggtttggtcagataggcgtccgcaccgtttttgtagccgctcatctgactttgtttgtcgtctcttgccgtcagcaggataacggggatgtgactgatcgcaatgtcttcctttatgtttttgcaaagctcatatccgttcatgcggggcatcatgacgtcacttacgatgatgtcgggagtatggcttttgataagctgaagtgcctctacaccatcagaggcagtcaatatacgtttgaagtattctcccagtgctttctttaagaagtccgtcaggtcgggattgtcgtctaccaccagaatgctgtagggggcggtggcgaagctgtcttcctcttgtgactgcttgccgctgtcgtcgctcatcaattcattcagatatgctttgggctggcagatgatctcttccgattccagtttcagcggtagttcgaagaagaaggtggctcccgattccgaattgtcccgtgcgccgatggagccgccgtgcagttccaccagaatcttggagtaagacaagccgatgcccgttccgctctgttcgcccatgccctgataaaaacgggtgaagagcttctgtgtgtctacctgctgcaatccgcaaccttggtcggtaatggagatgcgtactcttttttcttcgggcagcagttctgaagtgatggtgatttccgtgtcttgcgggctgtgtttcagtgcattgatcagcagattactcagaatgatttcacatttgtccttatcgaaactcactattttgatgcgtggatcgagccggtaatgaatctgtatattctttgcttccccttcgctgacgaaatcttgcgatacatgttcgatccattcgttgagcgggtgaggctgtatgagcagtttgctttctcccacttccatcttgcgcacatcgagcaccatgttgatcagattcttcattcgctgagactgccggtaaatcgctttcagcggcaggtattgggtatctgtcggggataaggacttcaatatgcggctgagcggagcgtggatcagtgtcagtggagtacgcagttcgtggctgatattgatcaggaaacgtactttttcttcgtacacctgttgctcgtgctccttcatggcccatttcaacttatcttcttttcgtttcagtgttctccggaaagtttcgacaatcattccggttactaacaaggcacagcccagcgtgaaccaccatgtgcggtaccagggagggagtacggtcagttccagtatctgctgactgggaatccagctgccgtcctttgctgtgcaggaagccataatctgataatcgccgggcggaagcgagcggatgaccagttccgggttgtacgattcgatctgctggtcgttcagcccttctatctgataccgatacactttctgccggaagatatcctcttctttggacatgatacggatacttatattactgttccagggaacggaaattccggtcgggtcaccgcacagttcattgttgacggattctccgttgacgatgacatccgataattgcagtttgggcagctcggaagtagccggcggcagattgctgttgatatgcagcagtcctttgacgccgcccatgtagacatctccgtggctgctcagcagacggggtttggaaagatattcgttttgaatggcaccatccgattcgccgaacagtacgaatttcttttctttgatgagccatgcgaaaagcatgtcattcgttccgaaccatacttttccctgctggtcgcacacgatgagcgttacttccgtgaatagcgtggtggtaaagggagtacgtactttggtagcgggattatagtggatcagtccgtagttgctccctatccagaagtctccgtattcgtcacgcgcaacggaattgatgaccgtatcgttgaagcaacggaacagagacgtcaggcggttgttccgtttgtccagttggtagatacgtttcgtatcgttgagataggtatagttttcgtgattggtgatgggcagaagagcgccgatgatgtcctgtccctcctgttcggtggcaatccggaaagtgcgtttgttcaggtcgtattgatagacgtggtcgccgagcagcagcacgttgtcggggctgttttgatacaggttgaccgcttttccccgattgcagaggcgggtggtcgtttcgtcgtcaatgattgtgaacggttgtttctctccggtagacggattgaagacgaatactccctgtgagaagagcgagatcagtagtttgtcgggagtgaactgacagatagatgccactttgtcttcccacgtagagagataatgggtgaacttctccgtgagaggattgaaaaggttgactccgcctccgtctgttccgatccatattttatcgtcggactgctgatagaggctgaggatggtgttgttgctcagtccacggtcgttgccgggcactacgtccgtgtaggtcaccattgacacttcgcggatgctgatcagtccgttccggatacttcctgcccatatattgttgttacggtcgttgtagaggctgaggatggagttggcggggagcgaatagttgtctctgccggggatgtgttccagcagggaaagctgtccggtttccggttcgaggatgttgataccgcctccgtccgttccgatccatagtttgttctcccgttcggcaaggctgagtatgacattgttgctcagcgaggagttgcgggtggtgtatgatgccagttgttttccgttccggtcgaaacagtagagcccgttattgtagggggcaatccatatccggttcttcgagtcgatgatcatgctcataatctcctttccgcagtcgaaaggcgggcggctgtatgctccggttttcaggttgagcaggagtagcccttgccagcggctgcaacagagtacagtttcttcatcccaaaggctgagtatcgtgatattgaagtttctgaaatccggtgtctggtcgaattcctgcagcaggcggaaagaaccgtcccggtagctgtaaaagtaaattttgtttttggctccgaataataacccctctggggtagggcaggtggaatatgcggtgatgttctttcctttttcgtcggttggcaggtagaagtcgtcactttgccgttggtagcgtgccacccctttatcagtcaagatccagatattgtattgttcgtcttctgcaatctgaaggacgaggtcgtgaggcaacgaatgcggatcgtctgcatgatggatgtatttcttcagttcgtggccgtcaaaccgtcccagaccggagcgggtgcctatccacacgaatccctgttcatccgtaaggatacaccggacggtggaaggtagtccttctttcagagaaatctgcttgtaatagtaatgccccgcctgtaaaggaaggacaccggccatttgtgtgataaatgcgatgcataggacgatatagagtcttgctttcattgaattaggtcgagtaaacagaagcaaagataatacattcggatgaatattgaataaaatgatatagagttttgagcaaagatgatattaatttatctataatctttatctttgctcgaaaatgtacgactatgattaccgaagaactacagaaactatatcaggaatatacgggagttcccgtagagaatataacagaattaccatcttccggttccaaccgccgctacttccggctgacaggtgcgaaaaccctgatcggcgtatgtggcacgtctgtcgaggagaatgatgctttcctttatatggcagcccatttccgcaagtccggcctgcctgtacccgaagttcatatcgtttccgaaaataagagttactatcttcaggaggatttgggagatacccttttgtttcatgcaatcgagaaaggacgtgctaccagcgtattttccgaagaggaaaaagagttgctccgcaagacggtccgtttgcttcctgccatacagtttgccggagccgacggcttcgacttttcccgttgttatccgcagccggagttcaatcagcgttctatcctttgggatttgaattacttcaaatattgtttccttaaggctaccggcatggaatttcaggaagataaactggaggacgactttcagaagatgagtgatgtgctgctgcgcagttcttccgctacttttatgtaccgcgattttcagagccgcaatgtgatgatcaaagacggtgagccgtggtttatcgactttcagggcggacgaaaagggccgttctattatgatgtcgcttctttcctgtggcaggcaaaggcgaagtatcccgatagtctccgtcaggaattgctgaaggagtatatcgatgccctgcgcaaatatcagcctatcgacgagccctatttctatagtcagcttcgtcattttgttcttttccgcacgttgcaagtgctcggagcttacggtttcagggggtattttgagaagaaacctcattttatccagagtgttccttttgctatccagaacctgcgtgacttgctcaaagaggcgtaccctgaatacccgtatctttgcaatgtgctacgcgaacttaccgaactcaagcaattcaccgacgatctcaagaaacggcagcttaccgtcaaagtgatgagttttgcttataagaaagggattcccgatgatcctaccggtaatggcggcggttatgtctttgactgccgtgccgtgaacaatcccggtaagtacgaacgctacaaacctttcacgggactggacgaaccggtgatcagttttcttgaagaagatggtgaaattctccgtttcctcgactctgtctatgcgttggtagatgcttcggtgaagcgatatatggaacgtggcttcagtaatttgtccgtttgcttcggctgtaccggagggcaacatcgttcggtttattcggcgcagcatctggcagagcacctgaaccgcaaatttggcgtgaaagtggagctggtgcaccgcgaacagaatatagaacgtacttttgaggcaactgtgtaatgaaagcaatgatatttgcagccgggttgggcagccggctgaaaccactgaccgatacgatgcccaaagcccttgttcccgtggccggacgtccgatgctggagcatgtgattttgaaactgaaagcttccggttttaccgaaatagtgattaatatccatcatttcggtgagcagattattgattttctgaaagctaacaatgatttcggactgacgttgcatatttccgacgaacgggacctgctgctcgatacggggggaggaatcagaaaagcccgtcgattctttgaaaattccgatgaacccttccttgtgcataatgtggatattctttcggatatgaatctgaaagaactgtatgactttcatttgcggaacggaagtgtagctaccttgctcgccagtcgccgtaaaacttcccgttatctgctttttgatgcggaacaaagattgcgcggatggatcaacaaagatacgggacaggtgaggcccgaaggtttcctgtatgatgagtcgctgtatagagagtatgcctttagcggtatccatgttttttcgcctgctgtcttcctgttgatggaagtgccgtgctgggaaggcaagttctctattatggacttttatctggctacctgcgggcaaacggattattacggttatcttacggaaaagctggaactgattgatatcggcaagccggagacgttggcacgggcggaagagtttttaagagagaatatagtatcatgagtatattcgggtaattagagttaatgaaaggcggagatattcggaaacggatattgccgcctttctttttttgtctcgaaagttgtctgataatgtctgttgacctcgaaaaatgcgataaaatggactattttagacatttttggaagaatcatagccaaaatcgaacatcttaaatcttagatataacctaaatttgtggcagtgaatgtcaggaaagacttcgctacttatataaaaggtaatcttaattaataaacttatgagaagcaaattcctatttctttgtctcttcctttttggaatgttgacagcttgcaaagacacaaaatgggtagatgttcctaccggtactcctcccgaaggttcagttacgggaaaaccgggcgaaacagaagaacccgatgatcctgatcctacagataaaacatttatcaactgttcttatatccgtggtgatttttttgaaacgaatcgaatttcgggagcaagtatgggtgcttgcaacgatttgatttatctgacggcacgtccttatgctgacggtgatttgacttttgacttacccgtgaatgatgcaacacttacaggggcagcaacgtatgctgcttcttataatggacgcaacggagtactcaaattggatggtaccggcaagatgaacgccggcgacggtctgttgcattcaccggacggagcattcaagaaattcacattcggtacttatatatatgtcagcgagtgggtggacggagcttgcttgtttaaaaaggtagacagcggttctgttgtcatcgctttccagttgggagcaacggaaggtaatttgaaactgactgtcggaagtgctacggccacagtgacgaatagcgcattgaaatcaggagcatggcattatgtagcggtgacttatgatggtggcgctgctaagttatatatagatacgaacaatactgccactgactttacaggctctctgcctgcttcggttcctaatacccgtgctgactttgtgatgggagagaacctgaaaggttatctggatgaaacatttgtgaacagtctgctgatgggtacattaggaagaaatcccatctcttttgataattggaataacacgaaaacacttgcttactggaaatatgatgacgctgcaaaacctggtaaggactcgcatacatgggctattcgtctggagcagattcgtactgccttgaatggacaggcaggtgaccggaagatacgtttgggtattgctggcggcgaatggttgaaaatggtcggcaacgcaactgcccgtactaactttgccaataacgtaaagaaggtgatcgagcaatataatctggatggtgcggacctcgactttgaatgggcttattcaggtactgatttatccaattacagtaaagccatcgtacaattgcgtgaagtattggggaaagatgtatttttgaccgtatccctacatcctgtttcttacaaaataagtgcggaagctattgcagcagtcgattttatctcgttgcaatgctatggaccttcagtagaacttttctctatggaacgtttcaaatcggatggtaaagctgcagtcgattatggaatacctcaggataaactggtcatgggagtacctttctacgggactacgggtactgccggcgagcaggctgcttattttgatcttgtcggtaagggtaacctgactaatacttctgcagacacatggagttatgaaggaaagaactatacgctcaacagccagaatacgattcgccagaagacacaatatgtgtgcgagaatggttttggaggaatcatgagctgggacttggctacagacgtagacgtgacgcatgagatgtctttgttgaaagcagtgaaagaagagcttgattactatgccaatcctactgtagaataaaatagaatcttaattagtaaatataatattatggaaaaaaagaagttcgtgagaaaacaagaacgctttgttctgtttctgatgctcctgttattatttcctctgggtgcgttggcacaacaaaaattgataaagggacaggtggtagacgaaatgggagaacctattatcggtgctacagtcatggtaaaaggtgtaaccggaggaacgattacagatattgacggtaatttctctattcaaggaaaagtaggaagcactctttctgttacatatgtgggatatgccccattgcaggtaaaagtcactaaacaggaaggtaacagactggtgatgaaggaagatgctaaggtgctggatgaagttgtggtggtaggtatggatacacaaaaaagaaataccattacggcagctgtcgctacattgaaagatgacgcgattgtgaatcgtcctgtgacggatgttaccagtgctttgcaaggtaatatagccggtttgaactttgcttcggatgcagtaggcggtggtgtcggtggtgaaatcggtgccgatattaaattcagtattcgcggtatcggttctattaacggtggcgagccttatgtattggtggatggagtggagcagagcatgcagaatgtgaacccggccgatattgccagtatcagtgtactgaaagatgcttctgcttctgctgtatatggtgcgcgtgctgcttatggtgtggttctagtaacaacgaagagcggtaaaaaagaaagagccagtgttacttatcgtggcacggtaggtttcagtgcacctatcaatatgcctaaaatgatgaatgcgttggaatacgctgcgtataataaccaacagtatgataatggaggagcttcatccggtttgcaaaagatttcggataagacaattgagaagattaagggatttatgcagaatccttattcggctgagttcccggggattgaagcgaataccaccggtgatgactgggcaggtgcttattataatcaatacggtaatacagactggtttgaatattatttcaaagacaaatctgtccgccattctcacaatttgagcgtgcagggaggttctgataaagtaaactattatattggtatgggatatacctatcaggaaggtttgctggataaggtacaggatgatctgagtaaatataacctgaataccaagttacagtttaagacaagtgactggctgcgcttcaacctgaataacaatattactttgcagatgatcaaacgcccaatggctaatcagatgattctgtataataagatcggtagccaccgtccgactcaggtgactgaactgccagttgaatcagaatataatatacctagctggaatgaaatgttgtatctgaaaaattccaattatcagagaaaccgtatttcggatgccttgtcgttttcggctaccgtaactcctttggaaggttgggatatcaccggagaaatgaaaatacgttttgatgttgaaaataataacctgaaaatgaaagatgaccagaagtacgaaactcctgcaggcactttcaaaccgggcgatgccactaatcagagacaaggatttgcttatccgggcattagctggaaaaacatgtatttcggctcttacacacgtggtagcatgtttaattattatctgtcgcctaatctgtcaagttcttatactcaccagtggggagatcatttctttaaggcaatggcgggttaccagatggaattgcaggagtattcggaagaatatatgtataaagacggtatgttgagtaacgatatttattcatttgataatgccagcggaaatgtgatagcaggtgaagcccgttcacactgggctacgatgggattctatactcgtctgaactggaactacaataatatttattttctggagttcagcggacgttatgatggttcttcccgttttgctccaggccaccgttggggattcttcccgtcattctctgccggttatgatattgcacgcactccttatttccagcaattggcacttcctgtgtctcagttgaaagtacgtgtatcttatggtcgtctgggaaatcagaatggtgcaggtctatatgattacattgctcaaatgccgttggatgcacaagggaccaacgcttggctgctgcctggaatttcgtcttccacggcgtccaaaggaacaattgccaagactccgaaaatgatcagcccatacatcacctgggagaaagtggataatgccaacttaggttttgacttaatgttattaaaaaaccgcttgtcactaactgccgacttctaccaacgtacgacacgtgacatgattggtccggcagagtctatcccaagcatcagtggcattgcttcggatgaccgtgctaaagtgaacaatgccactttgcgtaaccgtggttgggaactttctgtaagttggaatgataaactgaaatgtggttttagctatggagtcggtttcaatgtatttaactacaaggctgtcgtgaccaagtataataatcctgaaggtatcatttacaataatcatacaggtctggctgccaataaaggttattatgaaggtatggatattggtgaaatatggggatatcgcgcagacgatcttttcctgtcgaaccgtgaaattgatgattacctgagaaatgtaaatctgacagcgttcaagtcgaatgacctttggcgtcgcggtgacttaaaatatatcgattccaatggggatggtagagtagacggtggtaaaggtactttggctgatcacggagatttgcagattattggtaatacgactcccaaatattcgttcggtatcaacttgaatctgggatataaaggttttgaagtatctacattgttgcaaggtgtggctaagagagattttccgatttccggaagtaactatatgtttggtggaaacaactacaatttcaaagaacatctcgattatttcagcacagagaatccgaatggatacttgccgcgtctgaccggctggaaggatgacaaagactttttggtgaataccggatataacaccacacgttatctgttgaacgctgcttacatgcgtatgaagaatctgacggttgcttataccttcaacaaaaaacaactgaaacatattggtatcagcaatctgaaagtatatgtgacttgcgataacttattcaccgtaacgaaactgccgaaacaatttgatccggaaacactgaatcaggtgaatatgtcggctggcggtgatgctcaaaatacggctccgggtctgacttctcctatgaagcagaatggtaacggtatggtatacccgatgaaccgtaacttcgtattcggacttgatttcaccttttaattagagaatgacgatgaaaaaaatatatatattattagtggttggggcaagtttcatgatgtcggcatgttcggacttcctggacagagagcctttgacaacacccaatagtgagacattcctttccaatgcaagtgccgtgaacaactatatcaacggtttgtatatagcacttccttctttcgggacttacgatatgggagttcgtggagaagagaagaacagtgataatatcgttgcggaggtttatgacaaacgtctgaacggagaattgcaggaaaacggaggaggtactacggaatggcagaaaggatatcagaacctgcgtaatgtgaattatttctttgaatactataaagtgccggaaacagaagagacgaaagatgtactttcaatgaaaggtgaggcttattttttccgtgcatactggcatttttatttgctgaccagatttggaagtattcctgtgatggatagattctgggacggcaatgcaactgtcggcggtttgcagattcctccgcgtgaccgttccgcagtggcgcagtttattcttgacgatctgaatacagctaagggattacttcactcgcgtagccagtataaaggtttgagagtgtgtaaggaggccgctattattatggctatgagagtggccctttatgaaggtacctgggagaaatatcacaaaggaacagactttgccgctgctgaagataaatcggcagacttactgggacaggtgctgacactgggcgatgaactgtttggtatgggacttgctttgaacacaaaagctaccgataagaatgcagtgaatatagaagatgcttatgcgcatgtattcaactcgaaagacctgtcggatatgacagaggttgtattttggaagaaatattcgatagcagatggtgtgattcataatctgagcagtaatctgggagcgggttatgtagataacagcggaccggcaggtttatctcagtcgttggttgataattacttgaatgctgacggaacacctatcaatcctgctgacggcatttttaaagatttcaatttgacttttaaaggccgtgacggacgtttgctggcgacggttatgcattcaaattgtaagtttaagtcaacctcaccggaatcaaaatcgaaagcgatgctggtagaggaatattcggaagaaaacaaacagatagttcgccccccttatctgactgaaggcggtcctgcgcgtaatgctaccggttatcacatccgtatgagtatcgatactacatatgtaagcggtcagggcgagacgtctcttccggtgatccgttatgcggaagctctgctggcttatgcggaagctgcggaagaattgggaaaatgtactcctgctgttttggaaaaaactttaaaaccattgcgcgagcgcgctggggtgacgtacaaagacccgtctgaaatcgatcctaatttcaccgattttggttataccatttctgccaatttgcaggaaatccgtcgggaaagacgtgcagaactggctttgcaaggttttcgtcttgatgatttgatgcgttggagagctcataaactgattcagggaaaacgtggaaccggtgcttattttggtacagacggtgtattgtacaaagcattcgatcctaaaaacgcagcggacttgaaaacgattctgactacagacggctggctcgacccacagaaggaacttcttccgagaggctatcagtttgatgctaaccgcgattacctgttgccggtacctccgagtgagatatcgttgaatcatgagttgaaacagaatccgggctggcaacggaaataggagaatggaacaagattcatttatgataattagatagataaagatatgaagaacatattatataaaatacttccggtatgtttgttgaccatcggtttgacaggatgtgaggatgagaccaagtatcgtcctctgccggaagctgtacctttgacaatgagcatcaatgaaaaggcgtttgtgatgggagaacacttgaaagtagatattaaagtggaaccagatgctgatggtaatgaggtggtagctaacgaagatttcgatatttactttacggcaaaagccggaacggaagatgtagcgaatgtgttcgaaccatttagtagtattgttactttcccgaaaggagagaagcagattcaggtggattttccggttaagacttccggattagttggtactactacgatggagtttgttgctttcgcacgtggttataagatggctaattccagtcagggaatcaaggtatctgattattatcggatatccatgtctctggaaaataatacagaaaatgtggtgacagaaggcggtaagtttgtattggttgccaaagtagacaaaccgagttctgtgccactcgaagtcactattactccgaaggaaggggaagagggcaggtatgacaatctaccttctactttaactattcctgcaggaagaacttcggtcaaaagtgctgctgtgactatcaaacaggactatgaaatgacaggcgacttgcagttggtattgaatctgaaaagtaattcttcttccaatccgatgactgctcctgcattgactattaccatgacagacctggaatcaatggctgatcctgatttgtatgatatgactactgtatatgagaatccgaacatcatgtttgtttcttatgatgatgactggtttacgggtaaagaaacagctaagatggacgaaggaacagcacatccgaatgccgaattgggcagtcagtggaagtttgattatgctattgagttccataaaaattcaacatcgggagattatcaaaaattaggtaatgcaacggatgccaatagaggaaatgttttaaagattgattggaccaaatacgcaaaagttactgatgaaggtgaattgaatatttgtgtaggtgtagaaggtactaattatggaacagcaggaatacattgctgtaagtctttagggcagatgtgggcacaaaatgttacacgtatatatccgggtatgcgtattgaaatgaaagttcgtttaggaggtaatagaacaggatttgtaccgatgatagaggtgaagaatccagcaactgctactacatgtaaagaagctaagcaatcaatctgtatacttaagaatgtttccggctctgcaatcacccaatcggtgaggggagaggttgtcagtgatgcgaagagcgtagtatctgctattcctaaagtagaagattataatatttattgggtcgaactagtcgatgaaaatacaataaagttaggtattaatggttctacaaccttggaagtcacaagggatatgttggattcatggccttttaccaaagcttctacgggaacatcagttggagcgaaaggtctttatttagtaatgcgaatggacttgttcggagaaggtaatagtgtttcttctgaacttccggcaggttgggatactgaactgaagtcaattaatcctgcaaattatgcaacagaaggaccaagaatgataatagactggattcgtttctatgtaaatgataactataaacgggaagcgaatgaacttgtgaatagagactataaagtctcaattcctggtaagttctaccagttctattaatctgtcatattgacgaaccgttttcaatagtatgaaataagttcaatgccggaaggccatcgtgcaacagcgatttacttccggcatttactgctaattcgggtggaaatagagaatattgtaaatacattagctatttgtagacatactttttacatatcttccctatctttgccatgtaatctaaataaattaatcattatggaaaacctgcaatcaaacttgttctattctttggcaggagtagccgccgttgcctcccttgcatcttgtacaaacaagcagaaaacgacagaacaaaagccgctgaacatcgtctatattatgacagacgaccatacagcccagatgatgagctgctatgacacccgctacatggaaactccgaatcttgaccgcattgcggtggatggtgtacgttttactcaaagcttcgttgccaattcattaagcggtcccagccgtgcctgtatgattacgggtaagcatagctgtgccaataaattctacgataatacgacttgcgtattcgacagttctcaacagacattcccgaagctgctgcaaaaggtaggttatcagactgcgctggtcggcaaatggcatctggaaagtttgccatccggatttaattactggcagatagtacccggacagggggattactataatcctgcctttattacacaagataatgataccatccagaaacacggatatatcacgaatctgattaccgatgatgctatcgactggatggaaaacaagcgagatccggagaaaccgttctgcctgctgattcatcacaaggcgattcaccgtaactggatggcggatacatgtaaccttgccctctacgaggacaagacattcccgttgccggataatttctttgacgactatgaaggtcgccctgctgcggctgctcaggaaatgagtatcgtgaaggacatggatatgatttacgacctgaagatgcttcgtccgaatgagaaatcacgcctgagatcactttatgaaagattcctcggacgcatggacgaaggacagcgtgccgcatgggacaagttctatgctccgattatcgatgatttctacaaacagaatctgacaggaaaagaactggccaactggaagttccagcgttatatgcgcgactacatgaaaaccgtgaagtctcttgatgataacgtaggacgtgtgctcgactatctgaaggaaaaagggttgctggacaatacactggtagtttatacttccgatcagggtttctacatgggcgaacacggctggttcgacaagcgtttcatgtatgaagaatctatgcgcacaccacttatcatgcgtctgccgaaaggtttcgaccgcaggggagatatcaccgaaatggtacagaacatcgactatgcacctactttccttgaactggcaggagcggaaattcccgcagatatccacggagtatcactgctgcctctgttaaagggtgagcatccgaaggactggagaaagtctctgtattaccacttctatgaatatcctgccgaacacatggtgaaacgtcactatggtgtacgtacggaacgctataaactgattcatttctataatgatatcaactggtgggaactgtatgatatgcaggcagacccgtcggaaatgcacaacctctacggtgaggctgagtatgaaccggtagtaaaggaactgaaagacgaattgctgaaactacaggaacaatataatgatcccgtccgcttttctccggaaagggacaaggaataacccccgaataatacaatgacaagaacgattttaatattactgataggctttctatcttcgatagtagccggatgtagcgatactaacttgacacatgacatacccttggttccacgcccggcgcaaatagtgccgggcagcgggaactaccttttctccggtaaaacggtatttgccgtagagaacgaggagcaggcggaagtggcacgcagctttatagctttgtttacccgtgcggcaggctttactccgaagttgacggtaggcgatgcggaaaagggaaatgttcgtttccagacggatgcaaccttgaaaagtgaggcatatacgctgcaagtgtctccgaaagaaatcattatcgaagcatcggatgcaaaaggattcttttatgctttgcagaccattcgccagttacttccggcatccatcgaaaaagaggaagtgtcggataaaaaagtaaaatggagtattccggcagtgagtattcaggacgaaccgcgttttggttaccgtgcgttattgctggatgcgtcacgcttctttattcccaaagagaatgtattgcgcattatcgattgtatggcaatgctcaaaataaacacgcttcactttcatctgacagatgataacggctggcgtgtggaaatcaagaaatatccccgtttaacggaagtaggtgcatggagagtggctcgtacggacctgccttttcctgcccggcggaatccggaacccggagaacccactccggtaggaggtttctatactcaggaagaaataaaggaaatggtggcttatgcggctgaacgtcagattgaagtggtaccggaaatcgatatgccggcacacagtaattcggcattggcagcttatcctcatttagcttgtccggtagtgaaggaatatatcggagtgctccccggtttgggaggacgaaattccgagatcatctattgtgccggaaatgacagtgtctatgcctttcttcaggatgtgatggatgagattctggaattgttcccttcccgatatatccatatcggtggcgatgaagcccgtaaaacttattgggagaaatgcccgctgtgtcaggcacggatgaaaaaggagaagattgccaatgaagaggatttgcaaggttatttcatgaatcggatgagcgaatatgtacgtagcaaagggcgcgaggtgataggctgggatgagctgacgaacagtagctttttgccggacgatgccattattctgggttggcagggatacggacaggctgcactgaaggctgccgagaagggacatcgcttcatcatgactcccgcacgcatcatgtacctgattcgttatcaaggaccgcagtggtttgagccgctgacgtatttcggcaataatacgctgaaagatgtgtatgactatgagccggttcagaaagactggaaaccggaatatgcggatttgctgatgggcgtacaggcttgtatgtggacagagttctgtaataagccggaggatgtggattatctggtattcccacgcctggcggcattggcggaagtggcatggacacaaccggaaaagaaagactggacttcgttcctggaaggcatggattcgtttaatgaacatctcgcagccaaagggatagtgtatgcccgttcgatgtacaatatacagcataccgtgagaccggaagacggagcactgaaagtaaaactggaatgtgtccgtccggatgtggaaatccgttatacaatggatggaagcgagccgaccgccgcttcaccgctctatgaacaaccattgttggtaaaagaagctcaaacagtcaatgccgcaacgtttgccgatggacagcagatggggaaaacactgacgcttccggtacactggaacaaggctacggcaaaaccgttgctgggtaataaagtgaatgaagccgtcctgaacaacggagtcagaggaagtctgaagcaaacggactttgaatggtgcagttggggaagtagcgaccgtatttccttcaccgtcgatctgttgcaaaaggagaaaatgaatacgctgacaatcggttgtatcactaactatggaatgggagtgcacaaaccgaaatcaatccgggtagccgtgtcggacgataatgcgacttatcgggatatcaacgaattggaatatactcccgaggagatattccgtgaaggaactttcatcgaagacctgtcgatagatatgagaggaaccgttgcccgttatgtgcgggttacaacggaaggagcgggagaatgtccggcaaatcatgtacgtcccggacaagaatcaagagtatgtttcgatgaactgatcattgaataaccagtcaccaaaaaacaatataataatgatgaaattaaagaaacgaacgtttttaatcttgatggcagcactgactgctaccttcgcttcggctcagaaacagcctttgccggagtggcagagccagtatgcggtaggactgaataaactcgctcctcatacctatgtatggccttacgccgacgcttccgatattggaaagccgggaggatatgaacagtctccttattatatgagtctgaacgggaagtggaaatttaactgggtgaagaacccggacaaccgtccgaaggacttttaccagccctcttattataccggagggtgggcggatattaatgttcccggcaactgggaacggcaaggctacggaacagctatctatgtcaacgaaacttatgagtttgacgacaagatgttcaacttcaagaagaatccgccattggttccatttgctgagaatgaagtaggttcttatcgtcgcacgtttaaggtgcctgccgactggaaaggacgtcgggtagtgctctgctgcgaaggagtgatctctttctattatgtatgggtgaacggaaagttgcttggctataatcagggatcgaagacggctgccgaatgggacattaccgatgtactgagtgaaggagagaatgtggtagctctggaagtatatcgctggagttcgggtgcttatctggaatgtcaggatatgtggcgtctgagtggcatcgaacgggatgtttatctgtatagcactcccaaacagtatattgctgactataaagtaagtgcttcccttgataaagagaaatacaaagaaggtatcttcaatctggaagtgacggtggaaggcccttctgctactgccagctctatcgcttatacactgaaggatgcttccggaaaggcagtattgcaggatgccattaacatcaagtcccgtggactgagtaactttatcgctttcgatgagaagaagattgcagaagtaaaagcatggaatgcggagcatcctaacctttataccttggtactcgaattaaaagatgcgcaaggaaaagtaaccgaactgaccggttgtgaagtcggtttccgtacttcggaaatcaaggacggacgtttctgtattaacggtgttccggtgctggtgaaagggacgaaccgtcacgaacattcgcaactgggacgtaccgtaagcaaagaactgatggaacaggatatccgcctgatgaaacagcataatatcaacatggtgcgtaactcacattatccgactcatccgtactggtatcagctttgcgaccgctacgggctgtatatgattgatgaggcgaatatcgaatcgcatggcatgggatacgggcctgcctcccttgccaaagacagtacttggctgaccgctcacatggaccgtacacaccgtatgtacgaacgttccaagaatcatccggctatcgtgatctggtcacagggcaatgaagccggtaacggcatcaacttcgaacgtacttacgactggctgaaatcggtagagaaaggccgtcccgtgcaatatgaacgtgccgaactgaattacaacacggacatctattgccgtatgtaccgcagtgtggacgaaattaaggcatacgtgggtaagaaggatatttaccgtcctttcatactctgcgaatatctgcacgcaatgggcaatagttgcggtggaatgaaagaatactgggatgtctttgaaaatgaaccgatggcacaaggtggctgcatttgggactgggtggatcagaacttccgtgaaatagacaaaaacggaaaatggtactggacttatggaggcgattacggaccggaaggaatccccagcttcggtaatttctgtggcaacggtctggtgaatgctgttcgtgaaccgcatcctcatctactcgaagtgaagaaaatatatcagaacatcaaagcgactttgtcagaccggaagaatctgaaagtctgcataaagaactggtatgacttttctaatctgaatgaatatatcctgcgttggaatgtgaaaggggaggatggaaccgtacttgccgaaggcacgaaggaagtagactgcgagccgcacgctacggtagatgtcactttgggtgccgtcaaacttccgaatactgttcgggaagcctatctgaatctaagctggagccgcaaagaggccgctccgctagtggataccgactgggaagtggcatacgaccagtttgtacttgccggtaataagaatacgacggcttatcgtccgcagaaggcgggagaaacagctttcgttgtggacaagaataccggggcactttcttccctgactttggatggaaaggaattgctggctgcaccaatcactttgagcctgttccgtccggctacggataatgataaccgggataggaacggagcccgtctgtggcgcaaggccggtttgaataacctgacacagaaagtggtatcactgaaagaagaaaagacatcggcaacggtccgtgctgagattcttaatgggaaaggacagaaagtaggaatggcggattttgtttatgcactcgacaagaacggggcattgaaggttcgcaccaccttccagccggatacggcgattgtgaagtcgatggctcgtctggggctgaccttccgcatggcagatgcttataatcaagtatcttatctgggacgtggcgatcatgaaacgtatatagaccgcaaccagtccggtaggataggactgtatgatacgacggtagaacggatgttccactattacgctaccccacaatctacagctaaccggacagatgtacgctgggcgaaactgacggatcaggcaggcgaaggtgtctttatggaatcgaatcgtcctttccagtttagtatcattcctttctcggatgtattattagagaaggcgcaccacattaatgaactggagcgtgacggaatgataactatacatctggatgccgaacaggcaggagtaggtacggctacctgcggaccgggtgtattgccgcaatatctagtaccggtgaaaaagcagagttttgaatttatgctttatccggtaaaatagcctgaaactgattgcatttggatagaaatattgcattgagatagaatataggggagcgaatggcatggatttagcgaagtttaatgaaaagcgcttcgggaaagccatgaaatttgctcctttatatttatctttgtctcattagcattaaatcaatatttattatgatgaacaaactacttacttctctctttttatcttctgtgataacgttgggcggatgtggactgacgaaagaaaactactatgtgaagcatgttgaatttccacaggatgcaaccctcgaacaaaaaatcgatatggcagcaaggctggttcctaccccccagcaggctgcgtggcaacaaatggagctgactgctttcctgcatttcggtatcaacacattcaccggacgcgaatggggcgatggtcaggaagaccctgctatctttaaccctacagagctggatgcagaacaatgggtgcgcaccttgaaagacgccggatttaaaatggtacttctcacggcaaagcatcatgacggcttttgtctgtggcctacagctaccacgaaacattcggtagcctcttccccttggaaaaacggtcagggcgacgtagtgaaagaactgcgtaacgcttgcgataaatatgatatgaaattcggagtctacctctctccgtgggaccggaatgcggaatgctacggagattctcctaaatacaacgaattctttattcggcaattaacggaattacttactaattacggcgaagtgcacgaagtgtggtttgacggcgcaaacggagaaggaccgaacggaaagaaacaaatctatgactgggatgcgttctacaagactatccaacagttgcagccgaaagcggtgatggcaattatgggcgatgatgtccgttgggtaggtaatgaaaaaggattgggacgcgaaacggaatggagtgcaacggtgctgactccgggcatttatgctcgttccgaagaaaacaacaaacgactgggcgtctttagcaaagccgaagatttaggaagccgtgcgatgctggaaaaggcaacggagttattctggtatccttcggaagtagacgtgtctatccgtccgggatggttttatcatgcggaagaagacagcaaagtgaaatccttaaaacatctggctgatatctatttccagtcggtaggctataactcggtgctcttgctgaatattcctcccgaccgcagaggattgattaatgaagcggatgtgcagcggttgaacgaatttgctgcttatcgggagaagatatttacgaacaaccggatagagaaaggaagaaaagactgggaggctgtttccggcagtgaaactgtttattccttgaaaccggagtcggaaatcaacgttgtgatgttgcaggaagatatcacgaaagggcaacgggtggagtctttcaccgtagaggcattgacggaacaaggctggcaggaagtggcgaaaggaacgactgtaggctataagcgtatggttcgttttccggcagtaaaggctacccagcttcgggtgaagatcaacgaatgtcgtctgacggctcacatcagtcaggtggcagcctactatgcagaccctctggaagaagagaaccggacggaaaactggaacaatctgcctcgtgcttcatggaaacaggtggctgcttctccgttgaccattgatctgggcaaagaagtcgaactctccgcatttacttatgcacctctgaaagcggaagcgaaaccgacgatggctttccgttacaaattctacgtgagcgcagatggcaagaactggaaggaagtgcctgccaacggtgagttcagcaatatcatgcataatccgttgccgcagactgtcactttcggtcagaaggaaaaggcacgctttatcaagctggaagctaccacccctacggctacaacggcgcaagtagaaatgaatgaaatcggagtgaccgtagctccttgaagaaacattgaattttaacttaataagtacatcactttaagaatagatacttattcattctaacctaataattatcaaaagacaaaatgagaaaagaattttatggtatattacctttagcgttaacttcctgtctggcttctcaggccactgctcaggagaaacagacccagcgtccgaatgttgtttttatctatgcagacgatatcggttacggcgatttgagttgtaacggagccaagactattcatactcctaatgtggaacgtcttgccaaaatgggagtacgttttaccaatgcgcacagtgcggctgccaccagtacgccttcccgttatgcgatgctgaccggcgaatatgcatggcgcaaagccggaacaggtattgctgccggagacgctgcggctatcatccgtccggaacgctatacaatggcgaacctgttcaaggatgccggatacaacaccggagtcgtaggcaaatggcatttgggactgggcgacaagggcggagaacaagactggaacaagcctttgcagccgggaacgaatgatatcggcttcgaatattcctttatcatggcagctacgggcgaccgcgtgccttgtgtatttgtagagaatgatcaggtgatcaaccttgatccgaatgatccgattcaggtaagttacaaagcgaacttcccgggagaacccaccggaaaggataatccggagttgctgaagatgcatccttctcacggacacgaccagagtatcgtgaacggtatttcccgtatcggatatatgaagggcggaaagtcggctctctggcaggatgagaagattgcggagacgctgacaggaaaagctgtttcctttattgaaggacacaagtctgctcctttcttcctgtattttgccacgcaggatgcgcatgttccccgtgttccgtctccacagttcgcaggaaagagcggcatgggacctcgcggcgattgtctgctcgaatttgactggtcggtaggcgagattctgaatgcactcgaacgactgggattggataagaatacactggtgattctttccagtgataacggtccggtagtggacgacggatataaggatcaggcagtggaattgctaggcgatcatactccgggcggcatttatcgcggaggaaagtacagttcgttcgaagcgggtacacgtattccttgtatctggagctggcagggtgtgatccgtccgggaacagtttcggatgcattgctctgtcagatagactggtttgctacttttgctgaaatgctgaatgtccgcttgccggaaggtgcggcaccggatagtgaaccgatgctgaaagcgtggacaggcaagcaaaagaagggacgcgaatggctggtacttcagaatgcacagaataacctgtcggtgacagacggaagatggaaatatctccgtccgggaaatggaccggcatatctgaaagcagtgaatatcgagttgggaaacagtaaggaaccgcagctttacgatctgaagaaagatccgaaagaaaagaataatgtggcgggtcagaatccggaactggtaaagaagatggcagcacagttggagaaaattgtagatggacgctacggtctgccactataaaagaaatgcttagagagtagcagtgggactggcggtcttgatttctagtaaatcggacgccagtcttttttttaaaccaaacgtaggttttcactgttatctttctatataaatgatatataaagaaagaacttatgttagtagtcgatttaggaaaatggatgaacaaaatcctgatagattgggggatagatgcgaaggttgccgatcgttttgatgaaacaattattgctatactgatgatagccattgctgtaggggtggactatctctgtcaggcaattctggtgggaggaatgaggcagtatacccgcaggaaaccgcatctttggaatacattgctgatgaaacgtaaagtgtttcataatctgattcatacgattcccgccatccttgtctatgccctgttgccgatggctttcatgcgtggcaaggaactgctggttatttcgcagaaggcttgtgccatttatatcatcttttctttgctgctggctatcaatgggattctgctgatgatcatggatatttacgatggaaaggagacaatgaagaaccgaccgatgaaaggattcattcaagtacttcaggtacttttgttttttatcggggggattgtgattatctctatccttgtaaataaatcgcctgctagtctgtttgcgggactgggtgcttcggcagccatcctgatgctggtattcaaggattccattttgggatttgtggcaggtattcagctttctgccaatgatatggtgcgtccgggagactggatcacgcttccttccggtgccgcgaatggtacggtgcaggagattacgcttaacacggtcaagattcagaactttgataatacgatttctacggttccgccttatacgctggtcagcagtccttttcagaactggcgtggcatgaaggattccggtgggcggcgggtgatgaagaatattacactggacctgacgacactccagttttgtacgccggagatgctcgaccgttatcggaaagagattccactgatggcggattatcagccggaggaaggagtggtgcccaccaattcacaggtttatcgggtgtatatcgagcggtatctttgcagtctgccggtggtgaatcaggatttggatttgattatcagtcagaaagaggctaccatgtacggagtacctattcaggtttatttcttttcccgcaataaggtgtggaaagagtacgagcggattcagtcggatatcttcgaccatttgctggcgatggtgccgaagttcgacttgaaggtataccagtattctgactaactccctaggggacatctttgccaacggcttggcacaactgtgccacgcctgtggcacggccgtgccaagctgttggcatagttgtgccaaagcgttggcacaagtctttcgcagggatgttacggatgatgctccggtatgtcccgttagttagcaaggaaggtcgttaaaagtccggaccgtttctagcttctttcatcagtcgttcgaagcgttttacgatatcgggatgttgcgcagccacatcgtgttcttctctgatgtccgtttccagattataaagctgcatttgcgtattgcctttccggatgtccgtgatgattcctttccattttcccatgcggattgctttgttgccaatccttgggtcaggatattcccaatataaataagtgtgttctttttgtttcccttttttgccgagcaatgtgggcagaaagctgattccgtccgttggcggacaagtgatgcctgccagttctgccagcgtaggcattacgtcctgaaaagcgcagatgtggtcactttgcgtaccgggttttattttgccgggccatgtgataatggcggggacacggatacctccttcatgcaagaaacatttgccccatccgtatgctgaattgaaaggtcccccgctgttgaaccagggagaatcgctgcctccgttgaacgtaggaccattatctgaagtaaacacaatcaaggtattttcgtacagatgttccgctttcagtttttcgatcagttggccgatctgctcgtcgaaataactgatcatagccgcataggtagcatgcggataccggcagggcagatatcccgcttgtccggtgtaaggcttttcgtccccgaatttctctacataatgctgtacccagcgttcgggtgcctgaagcgagacgtgcggcaggggagtggtccacatcaggaaaaacggtttgcgtttattggcatcgacaaatcccatcagttcatcaaagatcagatcgttggcatattccttttgcgtatatttagcgtagctggcgggatcgttcggatcggcacctttatccagagggcttcggtgagggtctgtcactttgttggacaggtagacacgttcttcgtcattatacagaaaaggaggatagtatgtgtgcgactggcgctggcaattgtatccgtagaatcggtcgaatccctgtttgttgggagttccttcggaacccggataccccagtccccacttgccgaaacatccggtggtatatcccgcttgttgcatcattcgcccgatagtcatcgtgttcgcctgtagggggaattgcccttccagctctttatgaacgtacaccgagtcgtagttgtttactgctccgcgttcggctaactcattgttgaagcggatttgcgcatgaccggagtgcatacctgtcatcagtacgcagcgtgccggagctgatacgggggaaccggaataatgttgtgtcagtttgatgccttcgctgcataaacggtcgatatggggtgtttctattttgtcttgtccgaagcagccgatatctccatatcccagatcgtccattaaaatatagataacgttgggagatgcgggttgggtttgtccgtgcaggtaaccgctgcacagggcgggtattgcgatcaataaatttcttttgttcatgatgttcttttttttaatcccatttataatctttcgttacatcttctttcagagccggtccgaattcgaatccagcttcttcgaaccatgctttgcggtgaaggatgttccggtagaaccggtcgaagtcaagcgcttccccctcgtgccacatctgtccggacagagcgaggatgcgggggaaaagtcgtcggtctatcattcgttccgtgactccgtcgtcggtccataatgcgcagctcatgccaagtatcagcggatttttctcgctgatggctttgtcggaagggttgttcagatagacatctttcaagtcgaacgtacgtgcttccgtatatcctttccacggggtgacggggaagttcagatacgtatagtagttggaactgcaaatgaccggataatggtgtttgacggcgtttctgagcgcgaggtctttgtgtccccgatagttccaccactggataacggtattgtccggcaacgggtagccgtcatgatagactacgtcgccccagaagatggctttccgtcctttcgacttcagatagtttgccatttgcgcagagaaccatagctggaggtcgtgactgtctttgagtccttctgtggtaatccttttccggcaatccgggcattgatcccagttgcctttcggggcttcgtctccgcccagatgtatgtagggagaaggaaagagggcgcatacttcatccagtacgtttttcaggaaacggagagttccgtcttttcctgcacaaaatatgttctgggtaaatccgctttgcggtatctctaccggcaatccgaaacaaccgagctccggataggcagagagagcagcttcggcatggcccggcatatctatttcggggacgatggtgatattccgttgacgggcatattcgatgatgtcccgtatttcttcctgtgtatagaatccctgctgttcttctcctttgcctaccgaaccgccagtccgggtgaggtgcggatattgcttgatttcgatgcgccatcccagtccttctgtcagatgccagtggaagtagttcattttgagcagtgaagccatgtcgatatactttctgatggtggcaatcttctggaactgacgtccggagtccagtaagaagcagcgccactgtgtgcggggatagtccgtcacgcttgcgcaggcaaaggtgatagatcctgctgaaccggctgcccattggcgtagcgtttgtacggcataggtgaatcctcctttgtcggaggcgctgattaccatctgttgcggatgaatcttgatccggtaaccttcggggggcagggatgagtcggttatccagcagatatcggctttggattcttttttttgccatttgatgggagtgcgggagagtacttcttctcgaaaaaggtttagataaaaagcggtagtgtcttcggcgtacatagaaacctttttccctaaaatcaggttgcctgtctgcatttccacttgattgggggtaggaaatacgatttgggcgcggacggcgactgtgtacgatagaagaaagagagctgtaaaaattaggtgcttcatggggtacagtgtgtttatttagattttgtaagagtcggcaaaaggattacccgtattagtctgatgtctcaaaaatacgaataaatttcaaatactcaattattcttttgagtaaacttacgaaatcaatacagttaaaaagggaagaggcagtgtcaaatatcaaggtctttcagccacgctaatgacgaaatgcttgtcctgtcattgggatgactgtcaagaagagccaatatttgccacagcctcttccggttagttccggattatccggttggtgatggattaccggttaatttccttcctcccatcccggattctgttcgagttggggattcagtacccgttcgttgcgtggaatagggttgaggtaatagtaatccggccatagatgattctgtttcggatggaattcgagatatccttcggagccgccgccgtcgatagtcacattggttcctgccgtgaagtcggatgcacgtacgtattgtccgagtttcttcttcagtgcatagtggcatttcttccatcttctcaggtcgtcgaaacggaatccttcggagaacagttcgatgcgtcgttcccgtcgtatttcccataatagcggactcacttcgtagtcgttgggataatccggatttccgagatcacgtttcgggtcgaaggctgagtttatttccgagactttcatgagttttacattggcacgcgggcgcagtttgttgattgtgacgtcggcaactgtctggtcaaactcgccgagttcgcacatggcttccgcgtagttcagcatgacttcttcgatgcggaaaataggcatatccgtctcttcatttcgttggctgcccatgctcaggtagcagcaatagtatttccagttgttatatccgaaggcagacttgtaccacggctggttctccagatagaagtcaaagtgaggcgatgcacccaaaataccaccgtcatatccttgacggaatggcaataacttctgtcgttctttgctggtgccgtacccgattcccatgcggacggtgaggctgtcgataaaactgcggtctttggagttatccgtaaatttccatttattgtcccaggctgtgctggaagccgaacggtctacccggtaaggaggagtgacgtgcagccacaaacgatggtcacggttgctgaactcgtcgtatatatccttgtcacccagataggcgtcactcgtccagcgtggctttccgtccgtgcacaggtaactgtccactaagtcgcgggtcggattgtaaaaggaggtggcggtcgttcccccgatgctgacagcgtgcactacaccgacagcatccgaatattctctgtacagaatgacgccggtaacatctttcagttccagtgaacagaacagatcgtcgtagcagtccgccacgttcggataagtctgtatcagttcagcggatacccgtttgcattcccgcagataagtttcggcgttgttgagtccgtgatatttgcgccaggtaccttcgaaaaggcagaaacgggagagtaaagcctgtacacaagccttgttgatggtgtttctgccttctccgttcacgttgatattcttttcggcaaattgcaggtcttccagaatgtgaccggctatttcatctctggaggcacgagggcctttgatcagttctgtttcgtcgtcgctcagcacatgatcaatccagggtacgccaccgtaagccgacaggagagacaggtagcggtaactacggaaaaagtaaccgacggaacgccagttcgccttttctacatccgtcattttcgaaccgtcaatgcggtcgagcatcaggttgaccctccggatatagctgtaatagttccaggaagtattgtctttcttgtcggggatggtcaccagttttctgatccagttgctttcgctggttcctcttgtctggttgtacgagatgtcgtccgtagaattttccgagccatagcccaatgaaggcagggtttcatacaatccccaggcgtatgccttgaaattgtcgtatgtttcaaaagccgtttcggcagtcgggtctcccaaaggatacctttccaggaaatcgttattgagacagcttgctaacaaaactgtacatataaagattaaatattttctcataatacattggttattagaatgtaacattgataccgaaagagaattttctcatgaacggatattcccaggcaccttttgacagcatatcggtttccagtccttccggcaggtgatcccacgtgtagaggttctctccgctgaagaatactttcacatcgtcgaagtagagacgctgggaccatactttgggcaaggtataggaaagcgtgatgttttgcagtttcaggtaagaggcgttggcgagatacttcgactgtttccagtggttgtagcttgtgtttaccccgtcgttggaatacacacgcggataataggcattggtgttagtcggagtccagaagtcgagagtttctttgaacaggcttccccagcctccggtaggccatgcgatctggtcggtgcgccaataatcccgtttgcctacgcctcggaggaagatagagaggtcgagtcctttccagctgattcctgcggtgatgccgtagtggaaacgcggagtcgagttaccgatgatacgctggtcgccgggattgtcggcggttccttcgccgctccagatggtttcggtatcgtcatcgaagttcttatacagcacgtctcccggaaaaacttttcctgctcctttcggaatggggattcccggttttagtgtaccgtctgcgttgaagtcgtcttccgtgtagaagcggtcggtgacatatccccagatttctcccattttcatacccttgcggtaaatcttgtcgcctagcaggttggtctcattattgtatttcgtgatttcactttgtgagtcgtacaggttgaatccgatccggtagctccagtccttgttgatgcggtctctccagttcagttccagttcccagccgtacgttttcaggtcggcggcgttctgtttggcggcggtggctcccactacccatggtaggtccataccgggcgccagcatgcctttggtgtcgcggcgataccagtcgaaagttccgttaaagcggttgtcgaagaatccgaaatcgactccgaagtctagtgtatataccttttcccacgagaaactgctgctgaccattgccggtgcattcagtgtagtcgtcttttgtccgtccaccagccattccgtcaagtaaggtgacatggaagggatgtagggatagttttccggagtgttgtccggcttcagtatgatctggttgccgatagagccccatgaggcacgtagtttcaagttagacaggaagcttttggtattcttcatgaatgcttcttccgaaatgcgccatccggcggagaaggaagggaagaaaccgaaacggctgtctttggggaaacgggaagtaccgtcgtagcgtccgttggcttcgaacatatatttaccgtcgtaagtgtaattgacacggtagaacaaccctctgatggcatattcatcgaaactgtcggtgacggatgccgttccggtagaaccggagagcgacggcagattttccagtaatacatccgtgcgctgcgaccattgcgattccttatggctctcttcctgattgtaaccacccataatagcgatatcatgtttacctattgaaaagtcataattggcgaatgcgttaatagcgttgtaattggtgaatccttgcgtcagggcataacgtgagttctctacattgttgagcagccctgtaaagttgaatcctatatacttgtatttgttaacgtacatccggttgtactcggtgatccggttgtaagtatattcacctgttattttcagtcctttcagcggagagatgataacacgtcctaaagtacgcagattggtcttcttgatcaccctcggttctccgtagcgtacgaaagtagcggacgtttcggcaggatattcgatgccgtcttgttcgtatggcaggatgttgtggtaggacggaaggtacatggcacttccccagacaccgtttcgtccgccttgttccactttgttctgggtagagttcgcgtatctgatatccagttgggtggtcagccacttgtttacgtcgacactcaggaagctggacatattgatacggtcgaatttgtctttgtccgttaccagaatgccgtcctcaccggtatatcccaggctcagtcggtagctggtccgctggctgcctcccgatacggagaaactgtggttctgcatgaatccgaagttatccatcatatcggcaaacatatcattctcccgcatcaggaacaggttgccttgatcatcgaaaatatatccgttcggataattggaaggattcgcctgatagtctcgtatgtaaccttcccattgggtgatgtttttcccgtctacataggtatcgtttgcccatcccatttccttgtacgccagtaccgattccaacggacttgctttctgcggaagctccgatgctttcgagaaagagaagttgttgttgtaattgaatctgggagccatgtcctttttaccctgcttcgtagtaatcagaatcacaccgaaagctgcgcgggcaccgtagatagctgcggaagcggcatccttcaaaatagagacagattcaatatcctgcggatcaatcatgttgatatccatcggtacgttgttgaccaatacgagaggctcaccaccattgatggaggttgttccacggatattgtacgtcatgtcgtctcccggagttcccgttgtcgattcaatttttagtcccggcacgactccttgtagggcagccgaaacgttggtaatcgggcggtcgcccaacgactctttgatatttacagaggctacagcgccggtcatattcacttttttctgtgtaccgaatccgatgactaccacttcatccatagtctgggtatcttcctgtagctgtatgttgaaaagtgtcttgtttttgactgttacttcttgtgtgacgtaaccgatataagtaacccgtaacttgctgttggcaggcacttccagtgagaattccccgttcatgtcggtaatggtcgcctgtttgctgccgtcgaccagaacgtttgctccaattagaggttcaccttgcgcatctgttacggttccccgtatttttatggactgctgggtagaagtagtgttgttgggggctgcttctgcctttgccgggacaggaatgataataatatgcttaccttcttgcctgtaagtgaatcctgttcctttgagtacggagttcagaacggaagagactgcttccctgacaaaattggcgctgaccttttgtttcacgtccagtttcgtctgattataagcgatactaaaatcggtctgatcttcaatgatttcgaatacttttaatagaggttggtttttcatagatactgttattggctgattttgcccataggctatgttataaaaacataaagcgaataacaatatataaaatttatgaatttttacgggataacctatgcccgacaatttataaaatttcatacttttgtgagttaatcattaatactaatttaagtgtacacaactaatttaaatgaagtaattttgatttgggggagttggtatccgcgaaatatcgactcccttttttctgtctatcggcctcctttcttatttaggggtgaataaattaagagaatgttctcgtcttcgactttatagtctatgtttcctatggttttggtcacgatattcatgatctccttgataggagctttttgtttgaacttgatggtatatacatcggtggtagccagatgcggagggacgatgatgtgtatgtcgtatattctctctatcgtaatgaaaatatcgctgagagtcattgccgcaaagttcagctcgcctctggtccagccggagtagacagaggcgtcgataatctttttattaaattctccggacgggttgtcatattccagttgctcgttcggtgtgagggtgatgatatcctcattgtttgctttctgaacgactacggaacccgattccaaagtagtggttgtcttctcgtcttctgcataagcgtgtacgttgaatttagttcccaatacttttactttcagatggttggtcttgacgataaatggatgttgcttatctttctttacgtcaaaattagcttctcctatcagatataccgaacggatatccccggtgaacttttgcggatataccagtaaagttcctgagttgaggtatgctgtggtgccgtcgggcaaggtaacctgtttttgttcgcctctgggcacatagtactcgacaagttctgtatgctcttcattcgattgtatatataggtaggatgccaccatagagagcaggggaaccagtaatacagccgccacctgtagccatttgcgcaaggtataccttgcagttgccttccgctgttggggcgcaattttcctgcggaagttctgataggaacgttcagtacttgcatcggctttgaaattctgatcttcccataattccatcaatgcttcatctttctccgcctgttcactggagtcgacaagccatttccataacttctctttaagttccggactgaacttatcggaagtaaagtttttaattattttatgagcgttcgacatattagcgcattttaggtgtggttacatatataagatacgtaacagattaataacgcacagcctctattctacttttttttagaaaaatagaataaaggttatgaataatgcttttcggatgtcggtaagtgcttgtgaaaggtggttctctactgttcgtttgttgatgcttagttcgcgggctatttcttcgttgttcattcctgattcccggctcatcttatatattttctgtcgttgcggaggcattttttctacaaccattgtcaccaatagttcgagttctttgaggtggatgttgtcatcggtttcgttgctttccagtggcgggatatacttttcggtttctttctgctgatagttcctgaacagtagtgtgcgttcgatgtgccgatacaccgcatttttggaaatgcggaaaagataaggtttaaggttattgatggtatggagggatgagcggttgttccataacgtaagaaagatgtcctgcgataaatctttggcctcttcttgcgattgcagtagtccgttgataaaccctttgatgcggggatagtagtataggaagaaagttttaaaggctttctcatctccttcgctaatagccttcagaagttgtttttcgtcaaaggtttccattgggggtattttttgtaaatgctgtaaaccctgcaaaaataagtaaattttgtatcgaaccccgtttattaacataaaaaactcttttttttctttccggctatgtccggcggagtggttgacagtggatttataacctccttgtatttcggctagtataaaatgagttcaaaatctgcgtaaacaggaagatggtcactgattcctccctgatatttcattcctttataggtacggaaaggttcatcatcaccgtatttcttgtcttctgtcaatagaaaggggaggcgggcaacagttgctttgtcttcaccggtgaagaatttagaggaagtatcgagtaaattgccggatacgatcaaatggtcgagcaatccccattttccgtggtatttataggagccaaaatggcgggatgttgcttttcgggcaagcagatggtagagtttccggggattggggaaggtgactgactgttggggatcagtagcttctaatatctctttgatggatttattggttgggtagtcattaaaatctcccatgatgaccagttgtggatgaaggcggatatttagcagactgtcggcttctgtgcgtagtattcgggcagcgtgtagccggtaaggttcggattccttggctccaccggaccgggaaggcagatggcagacgattacatcaagtgtatctccggttaataatagtccgctgacgtgcagtaaatctcttgtggggcgatgatgcttgaatgaggggatggggatagaccggaaagataataatttgaataggtcacgttgatataataaagcaacatcaatccctctcagatcgggagaacttgtcataacataccggtaactcagttcctttaaaggagaacgtcgtgtgagatcacgtagtacactgtcgttttctacttcacaaagacctacaagggcgggtggattccattcaccgacggcagtgatgacacgggccatatcagccagtttcttcttgtacttggtgtagttccagtgacggatagcgtcagggagaaattcattatcgttctttagtgtatcgtggtgagtgtcaaagaggttttctacattccagctcatgacacgaaagggaattcgttcttcggcggaagacttcttctgggaaacagattgtttattgctgaacgattctttttcggtaagggaagtttgctttgcaaaagaagtttgccctatgatataagagggcacgaaaaagagcattataataaagatgacggtcatagcaaatctttttctgctatcaccatcatcttttctatgatgtcttacctgactgttatttcttggcaggaacatgtgccagaatatccaacaggtgcttccagaacttctcaacggaagggatgtgcatccgttcgtcgggagagtgtactccggtgagagtaggtccgaaagagatcatatctaaagtcggatacttgtcgaggaacagaccgcattccagtcctgcgtgaattgctttcactttcgcctctacaccgaaaagtcgtttgtaagattctgctgccacttcgaggatagctgaatgaggattcggcttccatcccggataaccttcaccgaaggtcacatcagcgcctgccagctggaagacggcacgcaccgtattcgccatgtcattgcgtgcagataagatagagctgcgttggctggtttcgatgcggataatatgattcggtttcattttgacagaagcaaggttggttgaagtctctaccagtccggggatatcctgactcatggcatatacaccgtgaggagcagcatacaatgctttcagcaagcgggtagtagtatcctggtcgatagccattttgcggggagtttccgattcaagaaccagtttcaggtccggttcggtgacggccagttcgttttctacttcactggtgaagatattcagttccgtgcggacgtcatgtttggcatcttcgggaactgcacagatggcgtatgcttcgcgggggatggcattgcgcaggttacctccgttgatttcgcagagatacaggtcctgtcggttagccattcgggacaggaatcggttcagtatcttgtttgcattgccccgtcccaagtgaatatcaccaccggagtgaccgcctttcagtccttttacttctactttaaagaaaaagtatcctgcggggacttctacttctttataactaaactctgcaacggagtcgatacctccggcacatccgataaagatttctccttcatcttcggagtcgaggttcagcagaatatcaccgctcatgaaaccttctttcagctcgaaagctccggtcagaccggtttcttcatctacggtaaacaggcattccagcgggccgtgctcgatgttgtcatccgccaggatagccagttcggtagctacaccgataccgttatcagctccgagggtagttcctttggctttcagccattctccgtctatttctgtttcgatagggtcggtaaggaagtcatgctgtacatcattgttcttttcgcacaccatgtcgatgtgcgattgcaatatgacagtctgaaggttttctttgcccggagtggcgggctttttgatcagtacgtttcctgcttcatctacattggtctccaggttatgttttactccgaatgcctttaggtaggcaattattttctcttccttcttggaaggacgcggcacttggcagatttcctcaaaatacttgaatacgccagccggcttaaggtcttttttttccatgcttttttcttttataataggaataggaggttcattttggttcctcttattgctaaatatggttaatttgcttgacttatctgaactcatttctcattaaagcctatctttgcactcacaaaattaatagaaatggttgagactatactgataactttgttaatagttgctatttccctgctattattaggggtgaaagtattctttacgaagggggggaagttccctaatggtcatgtgagcggtaataaagagttgcgtaagaaaggaatcggttgtgcgcagtcgcaggatcgtgaagcacaaaagaaatcacgtttttctattgatgagttggaaaaagccttgaacgatagtatgaactaattaattaaaaacaatattttagagttatgaatagaataaactacctcatgaacggtttagctgcacttgcgtttatcgttttattctcacaatgcgccggcaaagctgataatcaagttgcaactactccggcttcggctaatgcagaattgtctggaatgaaaatagcttatgttgaaatagataccttgttggctaaatacaatttctgtattgacttgaatgaggctatggtaaagaagagcgaaaatgttcgcatgacgctgaaccagaagatgacagctttgaacaaagaaaaacaggaattccaaaagaaatatgaaagcaatgctttcctgtcaccggaaagagctcagcaggaatacaatcgtttggctaaaatggaacaggatttgcaggaattgagcaacaaacttcaaaatggtctgatggaagacaataatgctaacagtttgcttttccgtgattctatcaacgctttcctgaaagaatataataagactcgtggatatagcctgatcttcagcaacacaggtttcgataatctgctttatgctgatagtgcatataatatcacaaaagaaattgtagatggattgaatgccagatattcatctgctaagaaataaaaaacgtcttttttaggcccttgggtttcctaagggcattcatgattttaataaattgatgcctgttcaagactgagaagctttgaacaggtttttttatttctcttcttttgcttcttcctgtggaatgcggaaagcggtgtaaagttcaagtacggcagcgatagtcagacaggcaatccattcatttccatgggtggtaaacatgaaagctcccgtcagtatcagcgcaagtgctccgaatatctgctggatgcgcagacgctttaatattttgctttttcctttaaccggtgtgtttacttgtgccagagcaatgaatccggctccgatggtataaatataaggagcatagttccatccggtgatatatacagcagcccctgtgagagccatgattgcgcctacggcgaaaagtgcgggtactaattgtttcatttattatcttcaaaaacgtaaatatcttcgttgggcttcttcatcagatacttttcacgtgccacctgttcgatagcatccggattgctgttcaactcgttgagacgtttggtgttctcttcgtagtccgcccggtatttttctatctcttctttcagctggctgatttcgcgttcgtatcccagacggcggaacaggctgttctcgtccagaaaaccaatgataacagcaaatgcaacgacggtgataagatacttacgtcggcatatgaaactccagatagtgatcagtttatccataacttctcttttttatatccgcaaagataaaactaataacttaaaaacttaccgctttaggttcaaaacttctttctctatcctttattacttatcacttttttgtgtacatttgcactgaaagcgaaaaatcaaaaaaaacagagagaatcccggatatggagaactatattgtatcagctcgtaagtaccgtccgtccacattcgaatcggtggtgggacaacgagcgctgactactacattaaagaatgcaatcgctacccagaaattggctcatgcttatttgttttgcggaccgcgcggggtgggaaagactacttgtgcacgtatcttcgccaaaaccatcaactgtatgacgcctactgccgatggtgaagcctgtaacgaatgcgaatcgtgtgtggctttcaacgaacagcggtcgtataatatccatgaacttgatgccgcttccaacaattcggtggatgatatccgtcaattggtggaacaggtgcgcatcccgccacagatcggtaaatataaggtatatattatcgatgaggtgcatatgctctcggcttccgctttcaacgcattcctgaaaacattggaagaacctccccgccacgctatctttattctggctacgacggagaagcataagattcttccgactatcctttcccgttgccagatttatgattttaaccggatcagtgtcgaagatacggtgaatcatttgtcgtacgttgctgcaaaagaaaatattacggcagaacccgaagcgctgaatgtcattgcaatgaaagcggatggaggtatgcgtgacgcattgtctatcttcgatcaggtagtgagttttacgggagggaatattacttataagagtgttattgagaacttgaacgttctcgattacgaatattatttccgtctgacggattgttttctagaaaacagggtaagtgatgccttgttgcttttcaatgatgtactgaataagggatttgacggtagtcacttcatcaccggattatcttctcattgccgggatttgctggtcagtaaggatgcagctaccttgccattactggaagtaggggcgagcatacgtcagcgttatcaggaacaggcgcagaaatgcccgttgcagtttctttaccgtgcgatgaagctttgcaatgattgtgatttgaattaccgtgccagcaagaacaagcgcttactggtggaactgaccttgatacaggttgcccagcttaccaccgagggggatgacgtaagtggtgggcgtggccctaagcagatcataaaacccgtattcacccaacctgccgcagctcagcagccgcaggtcgcttctgcaccgtctgctcaacagactactgttcatactgctccgtctccggctattgcgccgtctgccgctaatactgctgtgcgtcaaccgcaggtatctgttgcttcgggggctgctgctccggcaaatactgcttccgcgccgtcacagagtgttggaatctcttcgatttccaaagaggaacggaagattcctgtgatgaagatgtctagtttgggagtatctatcaaaaatccgcaacgtgatcaggctgctcagaatacagccaaaaccaatgttgctcaggtgcaaacacagccggaagaagactttattttcaatgacagagatttgaattattactggcaggaatatgcgggacagttacccaaagaacaggtggccattgcaaagcgtatgcaagtgatacgtccggtattgttgaataattcgactacttttgaagtagtggtcgataatgagattgctgctaaagattttacagctttgattccggaattacagacttatcttcgtggaagattgaagaacagcaaagtggcgatgacagtgcgggtaagtgaacctgcagaaactgttcgggcggttggtcgtgtcgagaagttccagatgatggcacagaagaatcaggcgctgatgcaactgaaagatgagttcggactcgaattatattaatgtactgatttctataagatttccatccggatctttaaagtaaatgctccggatggctatgaaagcaatactaatgcaaacgttgattcattctgtcaccgtatccgtcgctatacctttcttccggcataatgatccatagaataagataaataataattcctgcaaaagcagtgaagatggtggctagtgcatagactattcttactaaagtagggtcccatccgaagtattcggctaaacctccgcatactccggctatcattcgttcctttctggaacgagtcagttttttgttgttttccataaagcgattgtattaataaaaaataagtcctgtaaatctttcgctttacaggacttgtcttttaaaattttttgggggtggaagaccggactcgaaccggcgacattcagaaccacaatctgacgctctaaccaactgaactacatccaccatgtctgcgtttctctaacgcggtgcaaagatagatattatctttaaatctccaaaagattctgctacttttttttataaaaaagatattcttttattccccgattatgcttgctgaagagggatcgcgcatcatttgcaaagattctcagagagttacgtgcatttacggaaatggagtcagtggggaaattaattggtagtaattgatgattcttttttcctgattgagcgggacgggctgtccataccaggctatattcgcaatggttgagtcgggtggtactatcttttactaattccatttttaccatcaggccgccatccgtgcgacgggcggacatattggaaatataattccccagtgaatatactaccagatgcttcccgtttgtcagactgtcttcgcgaacttcgataggctgcacaacatgaggatgacaaccgattatgtgatttactccttttcgaagcagccaatcggtcagaaacttctgttctttgtcagggagtgactggtattcgattccccaatgcatacaagcaataattgcatcggggttcattgttttacttgcttcgatatctttggatataatggtcgtatcagtataattaacgatgttgggcggagtgacagggattccgtttgttccgtatgtatagttgagtatggcaatgcggaagccttttttttctaataaaagagggtatttattttcacgctcttcagcgttgaggtacgttccggcgtgtggaatttttaaggagtctattaattgtatagtgcgttctaagccttttctgccacggtcgagactatggttattggcggttatcagtacattgaatccggcattatggatagcggtcagatattcatcgggagcgctgaaagcgggatagcctttgtacggttttcctccgagagtaacttccagattagctatggcaaagtcagcactttgaatttcgtctttgacatattcaaaatagctggaataatcgtagcctcctgtcgcagtacgtgcagcgttaatttgtccttgatgctgcataagatcccctgcaaaaagaagcgaaagggtgtctgtttgcaggctgtcagttgtcagtatctgtgtggtagtatcattttcttgcgctttgctgatacaagagaattgtgtaaccagaagaagggatactaatagttctttcatacgttcaagaggattataatgtcttttcgagaatgattgttacttaggcaggaaacggacataataagagagggagagtcgtaattgttttcataactgtcagattaagggaaggaaaaggacagtgaaacacatttcactgtccttcaatattctacttgtaaatagcttttttaccggctaaaagtgtatttttcattaatgatacaatcgtcatcggacccacgccgcccggtacgggagtgatgaatgagcacttaggcgctacctcatcaaacttcacatcgcctgtcagcttgaagccggattttttgctggcgtccggaacacgggtagtacctacgtcgattactactgcaccttcttttaccatttcttctttcacgaagttgggttgtcccaaagcagcgataataatatctgcttcctgacattcttttaccaggtctttgctgcggctatggcatacagtgacggttgcatctcccgggtacgctttctgcatcatcagtgaagccatcggtttgccgacaatattgctgcggccgagtacaacacatttctttcccgacgtctctatctcatagcgtttcagcagttcaagaataccgttcggggtggcggatacatagcagggaagtccgatagacatgcgtcccacgttgatagggtggaatccgtctacatctttacgatagtcgatcgtttcgataactttctgttcggagatatgtttgggtaacgggagctgtacgataaatccatctacgtcgtcgtcattgtttagttcgcgtactttggcgagtagttcttcttcggtcacgtcactttcgtaacggatgagggaggatttgaatccacatacttcgcaggcttttactttggcggctacatacgtttcgctgccaccatcatgtcctacaaggattgctgccagatgcgggcgtttgccgccacgagcaacaatttcggctacttcggctgcaatctcttgtttcacttgttcggaaatggcttttccgtctatcagagtcatattttcagagtatttattggtgatggacaaaagtaaaataaataactgaactctccaaaaggaatggactttttgtggagaggggacagcggaacatattggaatgcgagtaggaaagaaggtaaaaagtacaagggaaagctctgattttcaggcaagaaaaacagagcctctgtttaggtgaaacggaggctctgtttacatcaatcagaggctctgttcgggtgaaatggagcctctgtttggtcttgtcagatcatgttcttatttgtcagcaatttgcctttatactctccggtcaatgtacggaggaaggcgacaatcttatctacttccggttgtggcaggtcgatgcctaactgatatttggccatggcgcgaaccgcatcatccatagtagccatgctgccgtcgtggaaataaggagcggtcagttcaatatttctcaatcccggcactttgaagcggtgacggtcacgctctgcttttgtctgcttgaatcgtccgttgtcttcttcagtcatttctgcctgacggtctgcgaaataatcatgctgtacaccgatcagttcataagattgtcctccgaggatttctcccacatgacaagtcgcacagtcatatttcttgaaaaggtcgtatccggcgatttcatctgcggtgatggcatctttctgtcctttcagataacggtcgaaacgtgaattaggagtcagcaatgtcttttcgaactcctgaatagcatttgtgatattcttttcgttcaatccgtcgggatatacttcgttgaatgccactacgaaattcttgtcttctgccagtttgctgatgatctgatcgaatgactcgcaagccatttctaccggattcaatggagggccggcagcttgttctgccagagttccggcacgtccgtcccagaattgaacaaagttataggcagcattgtatacggtcggggcattgacgccgcccaactgaccgcctactccttcagaatactgcttgttgtcaacgccaccggtatccagaccatgacagctggcacatgaaacggtgttgtctgccgataagcgggtgtcgtgatacaacagatttcctaagaccactttgcgtacatcgactgagatcgagtcggcaataggacgaatcggttcgttaatgaaatcaggtgctactgccacatcggtatacagtcccatgcggtgatgttttacccagctcagtgctacctctttctttgcatcattgaaagaagctccccaatgtacaaggtaatactttgcctgcggcatctttccgtcgaggattactttttctactttagccagatcaaccggattgagagggcgtccttccttcatgtctttctccatctgagtcatgtcgaaagcgcgataggctttgctcacgtcttccattacaatttttccggctacaggcatatttgcatagaacggtagttccggcgtcgaggtatggcatctcaggcatcctgcatccgtaataatctgttgcatctgcacgtttgcttccaaatcggcagaaggcacccgatgcatcagtcggtaaatgactaccaatgccgccacgactaccagtaatgctacgattagttttgtacttctcttcatttcacatttgttttttgaggttagttattacgattatataaatgtacgctttgttgggccgccggcaggtaattgactccataccagcacatttgtaaagcaaggaaggagactatgagcagggcatagagtgttttccgtccggttcttctgaacaggcggaggtggatgtagagcaaatatcccatccaggtgatggctgcccaagtttctttggggtcccagctccagtagtttccccaagcctcctttgcccagagagaacctagcagcataccgatggaaagaaaagcgacgcctgcgtagaccagattgtctgctgtatgcaggtattcttctttatgacggaacagtccggtcagggcgatgatgaaagcacatcccagaacggaataagagaacatatatacggttacatgcgggatgaaccatacactttgcagcgccggcatcaatgactgatcgtgtatctcgggcttcatcaaattaatgatcacaaaaactgtagaaagtaacgtcgagaaagagagaatccagcgatacttccatctgatataggttagcaatcctgctattcccataaagaatgaataccacaatcgggtttctcccatagtgcgtaatggagggcgctggaggaatatccataatccggcaataaatattcccaatataataatgccgccggaagtaaaaacgattgccaccttactcttcgatgatgaacgaagggcaaatacagctcctgccaaccataagcagatggatactgctgcaaatacatagaagttatcccagtttatcatacgctttagctccgtttataaataaaagaactgctcctgcaagcatcatcagaatacccgctaccatcacatatttccagggctgttttacgacctgtagaatgcagtaattgctttcgttgccttttgttacgtcgtatccggtgaggtagacgtcttcccccagtcggtaggaatagggatggtttacttccagcagaacgttctcattccccaaacgtacattggcggaaaagcgggaaggacgtccgttcgggtaatattctacagcgaacgaattgagttccatatcataatctaaatagtaagatgtgccattcatgtcgaatgcctcgtgtgtcggttcacctttatataaaggtatgcgtaatgtctgcgtgtcactgctacccagaaatccagcaaacagagccagccataaacctgtatggttcagaataaagcgccagcgtgcttgtttgcgatgccgacaggcgtggatggtgatcatcgccagattgcttaataataataagagtatagaaatgaatatccatgaagtcatgaaattgtaacatcccaatgaggctgatattccattgcgcatttctgcttccggttcagatagttgggggaaaagtcctatgatcaggcaaccaccgataaacaggctgatagataaaacgctggctttggatgaaccgagaaaacgggtgattcttagattattatattctttatatagtatccataacaggaaaagccagatcgccgcaaagatgatattcagcggaaaggcgagaaaagaaacaggaaagtttcctgtgaacagctgcatggctgctgctaataaaatgtaacctgctacatatacatagtacatattcgtgcttctgttttgttatcttttgcaaagtaaagaaataaaaatgaatattcatataaaacctttgtaaaattgtaatcattacaagtaaatagtgatattaatatggttttaggataatctttcagtgtagttgttggcgaaaggagcggggatatggaagctaaagctgcgctttacaaggtataaagctgcgcttttcactccctaaagcatagctttataccttgtaaaacgcagtgttttatattgggtttatcatggcgggagtaatcactacaagagtctgtggaaagtgaaaacttgaaaagttgaagttgccaggtaaaaggctgattggtataggaaagtgaaatctgtaataccaaaaataaaagaggaagcctaagcctcctccttctatctgaaacagaataaaattctttttattttttcattttcggcatcatctttcccattttgctgctggttaccatcttcatcattttgcgagtctggtcgaactgtttcagcaaacggtttacttcctgaatcgttgttccgctacctttagcgatacgtgtacggcgtgagccgttcaatatttccggattagaacgttctgccggagtcatggaatagatgatcgcttcgatacttttgaaagcattgtcgtcgatatcgatatctttgatagctttgcctacgcccgggatcatggatgcaagttctttcagattacccatcttcttgatctgggcaatctggctgaggaagtcgttgaagtcgaactgattcttggcaatcttcttttgcagacgtttggcctcttcttcgtcatactgttcctgagcacgttctaccagcgaaacgatgtcacccataccgaggatacggtctgccatacgtgccgggtggaactggtcgatagcatccagcttttcacctgtacccacaaacttaatcggtttgttgactaccgaacggatagaaagagccgcaccaccacgggtgtcaccatccaatttggtcagtaccacaccgttgaagtccagacgttcgttaaattctttggctgtattgacggcatcctgtcctgtcatggagtctaccacgaacagaatttcgtccggattgatcgcttctttgatagcggtgatctcgttcatcatctgttcgtctacggccagacgtccggctgtatcgacgattacgaggtcatatcctttggctttggcttcctgaatggcgtgttgtgcaatctctaccggatttttgctgtccagttctgagtacatcggcacttcaatttgttctgccagtacacgcaactgttcgatagctgccggacggtaaacgtcacaagctaccagtaatggtttgcgattcttctttgttttcagcatgcgtgccaacttaccggagaaagtagtcttacccgaaccttgcagacctgacatcaggattactgccggacgggattcgaggttgatttctaccgtctcgccacccatcaactgggttagttcgtcgtgcacaatcttcaccatcaactggcttggcttcacagccgtaagtacattctgaccgatggctttttccttcaccgtgtcagtgaaagtttttgcaaccttgtagttaacgtcggcatcaagcaatgccttacgtacatctttcagcgtctccgccacgttaatttcggtgattttgccttcacctttcagaatcttgaatgaccgttctagtctttcacttaaattatcgaacatagttgtttaattacgaattaattatttgagcctgcaaatgtacaaaaatctcttgtatttatatctttttattctgccattttgcttttttgaggtaaatatagcttgttatcaacagcaaggtatagtacagaatctcaatcgtaaagcagatttcaatcggtgcttttagccacattccgacgaaaacgatgtaggaaccgtaaatggcaatcgtgatggtttcgagcaacagggctgcctgcgtatttcctgttccggagatgccgttgaatacgacattggctactgatgcaatgagcatggcgcagcagataacgtataccgaaggcacggactcggtgattaacgctgcttcgctggtatatacggagaggaggaactgaggaaacaaaaccgacaatcccaccagtcccagcatgatgaagaacgagaatcgggctattttattgataagcggcatgacgtattggatacctcctgcgccgatggcattgctgacaaggctgttggtcgttgttgccagtgcattcaccggaatcagcagtacgacgtagatactacggacaatattggcaatggccagttcccgttgtcccaaccgttctacggcaacaaagaacacgaaccaggtcgccatcgataagaaatattgaagcatcgtgaagcaagaaatgctgagaatacgcatcagcaatgccggatcgaacgagcgcagacgattcagaccatactttttcaaatcaacactgatatatgtatagatcaggaagaagagaatggaagaggcttccgccagtacagaagcgatagcagctcccttgattcccatttccggcagaccgaatttaccgaaaatcagtgcatagtccaatatgacgttggttaatgccatgacaacagcattgatggtcaagaccttggtacgtgtgatgccgatgtacagggcacggaacatgacattgacaaacgagaagaagaacccgtaaatacgccagtccagaaactccatagtgccttcgtagatggattcggaagaaaccagcaaccgcatgatatttcctccgaacgctttggtgaagccgaacatcaatatagctatcaacaggaggaacataatcccctgaatcattacgggacctacatcactgtagcgtccttctccattgcgtcgtgcaatgacaatttgtgatcctgtgctgaatccgaaagcgatggtgaatatacatatataaaatagtccacccatagccgaagctcccagggccacttcactaacgtgccctaagaatgcggtatcggtgacattgatgacattttgcgccagcaagctgagtagtatcgggtaactgacactccaaatctgtttgttggtatacataattaagcgtttaagtttacagtttgcaaagatagcgctttattccgattctgaagcaatgggataggtgaaaacaatttccgggccttctgttccccgggcgtttacctgatagcttcctccgaagtaagccagcaataactggttgatctcatgcctgatgccggtctcctgtgaggtgaaagcctcgtccgccaatggagagttgagaatgcggaaataaagcatttcgcctttccggcttaatgtaaagcggataatccgttcctcctgttgtccctctgtttcatgttcatgcggataggtcagggtactgagcagagcgtatcccaatcgggtggtatctgtgcgaagggacagtgactcgacttccggagtgaagcggacttgaatgcctgtcttttcattattcatgcgtgccatgtagcatacttcgttacaaagtgcgacggcatcatagtcttgtatctggaacttcatcattttggcttccagacgagacaggtcgagtacatcattgaccagtctcattaatctttctgagctttggtggatgatcgccgagtattcttctcttgttttttcatctatattcggttcgctggctatgagttgcgagaaacctaccacgttgttgagcggggtccggatgttataactcatgtttgacaggaagcgattttttatttcgttggttacccgtaccgtttccgctgctttgcgtatttcgctctcggaatatttcagggctttgcggattttggagagccggaatagggaaataaataatacgatcagaatggcactgattacgatcaggctgatcagacgtatttggttggtctgcttttgttgttccagttctatcttatccagattatagctttttttgatttgctccatttgggtgttggagagtgccatggcagctgagtccttgatggccagtgcctgttggtagagagttgtcgctctgttattatctccggcttccacccatattttagcctgtttcagcagttgttcggcatagtcgctggtgaaatctttcttgagcatagttaatgtcgtgtcgatgtaggctgatgcctgctgatattgtttgatactctgatagtatttcgcatagatgtcgtagtagagcaccttatacatgaaataggtattttcagtcagatactttttagacttttctatatgtgaataagcaatttggggctgattggtattcaggtaataatgcgcatagaaaatctcattgaaaatgaatacgtctgcaaatccgtcttttagagatggattgtcaatgatgaatttacggagtacattttccaactcttgcaggtattttagttgcctgtaattgtccttcatttctttggttacggatatgagctgtgacaggacggagatatggactaccgcattgccattctttggaagcagcctgtaggcttcttccaatgctttgagcccctcgtcccagcgctggctgccgatatatgcgttggacaggcactgataagcagctaccgttccacggttattgtcaatatcaagggctttctgtttcatcttgtttgcttcgctgatggcaagctcatattgttcggtaaaggtgtataggtcaatctgaaagcgtcgggcgtcgaagaaataatcccataaaccggatttttgtaccaacggttccatcttgactatccatttggctacactatcctgttcgcaacggttgtaataatacaacaaatgataataagcggctaaactggcatacttgtcatttttcagttttaacgcttcctgcatcagcgaatccgaatactggatacatttgtagttgttctgctctatcttgataatgtcgttcagggtagagaggcgtgtggtgtcatgcggcagcgtttgcaacacttgcagcagactgtctgaggctgtatcggtgtttgcatagcccgacagtaggccatagcaggtgatgatcagtaatatcagtcgtttcatcgtgtttcctccttctttatctgcgcatggcaaatcgggtgtgtgaacagaaaacgtgctcctttgtcatagtccgggtcgatccatattttgcctcccagttgctcgatgataagctggcagatagataatccgagtcctgtgccttgtgcgttttcatcgagcttttcgaagcggttgaatatcttgttctggttctccttggagattccgcaaccggtatcactaacggagaaaagggccgtatcttccgtttgtttcaccagttccagggtgatagtgccttgtgcagtaaactttgtggcgttgataagcagattgatcagtacttgttgcaggcgggcactgtccgtggtcagcttcagtgaactgagagaggtggaaaaccgtacttccgcttgagtctgctttattttctctaccatgtcgatgacatttctgcatagcgctacaatatcacactcgttgaatttgaattgcatttttccaatttcaaggctggataagtcaattacatcattaatcagtttgagcagcagttctgagttctgctggatgatatcgttgcactgttgttgcgtttcgttgtcgatggattcttctgtcagaatagctgaaaaaccggataaagcattgagcggagtacgaatctcatggctcatattggagagaaaaaggcttttggtgtggatagacttttctgcttgtttcttggctttttcctgttcctgttgtgattgcagaagacgattgttggtgcgcttgatgcggaaaatggcaatgatgatcagtactacgatcactaagatcacagacagactccaataatagagatttttttgtatgttgatataattaagttcgcttttatctatctgatacagggtatgcagttcgtttatctggctgagataactttgggcgtccaatgaatctttgagatgattaatctcctcataaatcttgcacgcctcttgtttctgattcataagtaccaggactttggcgcgttcctgtaataactgaacatgtctgaataaagccgttttctttgttatggtgagtaattcttcatattctttcagcgctttatcatattcttttgactcaatatgatagccggcatacatatagttgctgattgaagaatagtagggatacggatatttttcgtagatggagtccagctgtttcagatactccagtgcttttggaaggttgtttgtctgtatataataataggcatagctgcaaggcagatagaagtcatcgggcaaacctgattctttatggtaaagagactccagataggcaaaatctttttcgatatctgtcatttgcctgtatttgagtttgctcaggatcaaatgaaacatgcttgtcttaagatatggaatacttgccggaattttttgcattattttcaaggattcctcataagactctatagcagactggggatttcccgaactttggtaggtgtctgcaagggcacgcaatgccagtgccgttccgaaaggataatctatagctttggcttgctgatacattgagttggcgttgttgactgccagactgatatttccttccgtaattaatgcctgaactgccatcattttcaatggaaacagaatatgatattcttgctgcttttcaagttcggggcttaagagcttttcccataagatgatgctgtccgttgtaatatcgatatttgtattgaaagaaagatcatgctcgacaagtggctggagtaaggtaagtcgttctttgttcaggtttgttgcatggagagccgccgatatgaatatggctgcaatgagtgctattatatgctgtaaattactattcactattttgtttgctcgtatggtgatgtgcaaaagaaataaaaagagcgaagactggcaagcaatcttcactcttttttatagaattattttcttttgaggatctcccgtgccccaggaccttcgtggctggggtagccgggagtatgatttctgcaccggggatcggcatctaccttcaaactgcggtaatcatctttggaacgtgtgaggtaatcgtccagcaaagcacgatgctcggcgagtattttggagtatttagggtctttggcaagattttttctttcacccggatcttttttcatatcgtacagttcttctccgttgccttccagataatgggtgtatttatatctcggtccgcgcaccatgcgtccgggagtggtaacgtactcatattcgctgtgccattcggagacaacataagggtggcttttcttttgtttctctccccttagagtcggtacaaggctgatgccggctttttctgccggaacggcgatgcctgccaggtcgcaaagggtgggcaggagatctaacgtcggctgtgtcagcagatggtctataggtttcttctgctgcttgatgccgggaccggcaaagataaacggaacgttggtcatttcatcatagaagctgatatgtttggtcaccatgcggtgggatgccatgccgtcgccgtggtccgccatgattacgataatcgtgtttcttccggcaggggtggagtagagggctttcagtacgctgtctacttgcttggacaccatcttggtgtaatgctggaaggcggcgatatagtgacgatagttttcttcgttccaatgggcagcctgtgtcatgcggcggtgactgcaacagatatattgtacgggagtcggaatattgctccagtcttccacatcaaagttgtccggcaattcgggcagcggtccgctgatcggccggtcggtgtgtactcctgcgttttcgccgatgaatccgcagatattatgcgggttctgaaaatctgcaatgcagataaaaggttctttcggaggattgctgaggtaggcaacggcatcctcgcaggttcctacatccaggaaactgtcattgttgaccggaaattcgggatcggtgaatggcttggctaccggttctttatgtttgaagcctctcagtgagcccatgtcgtgagtcttgccgaagtgtacggcctcataaccgctttcggagaagagactacccagtgtcggcacattttccggcagacgggtgttgacgggttcgctggagtttgagcgtacattggtctggtggggcatcatgccgctccataatgctgcgcgtgaaggttggctgagggggcagcctacataagcgttagagaagattacccctcttgatgctacttcgtcgatgggaagtgtgcagccttgtgtatgtccgtaagcgcctacgacacgctgtgtcagatggtcgcactggataatcaggaagttcggcttttcttgtgcctgagctgctgcgccacaaagggctaatcccatgaatggataaattgttttcattcttggttagaattaagtaattgattgggtagcaaaagtaggaaaaaacaaaaagcaaaaaagggcgggggagtggttttggacgtaaatgaaagtaatttgtacaaaaatgaaatacgcgatgaacgattcatgaggaacagcgaaggctgcgatgaataatcaatgaaaataatcaatgggaatcataaaaagaacggtgaataaactgcgattattcatcgttcagtctattcaccgttccttatttatggatcgtttattcttgatcagctattcatgctcatcagaaattcgtcgttgtctcttgttttttccaggcggtcttttacgaaatccattgcttcgatagggttcatatctgcaaggtatttgcgtaatatccacatgcggtcgagcgttgtcttatcaagcagcagatcgtcgcgacgggtactggatgcggtgatgttgacagcagggaagatacgcttgttggacaggttgcggtcaagctgcaactccatgttacctgtacctttgaattcttcgaagataacttcgtccattttggaaccggtgtcgatcagtgcggtagcgatgatagtcagcgaaccgccgttttcgatgttacgggcagcaccgaagaagcgtttgggcttgtgaagtgcattagcgtccacaccaccggaaagtactttaccggaagcgggagatacagtattgtaagcacgtgccagacgagtgatagagtcaaggaagatcactacgtcgtgtccgcattctaccagtctttttgctttctcgagtacgatacctgcgatttttacgtggcgttctgccggttcgtcaaaagtagaagcgattacttctgcgttgacgctgcgtgccatgtcggttacttcctccggacgttcgtcgatcagcagcataatcatatatacttccggatgattggctgcgatggcgttggcgatatctttcatcaagatggtcttacctgtcttcggctgtgctacgatcagtgcacgctgtcccttaccgataggagcgaaaaggtctacaacccgggcagacatggagtctgaataaccgcctttgcagagtctgaatttctcgtccgggaagagcggagtcaagtgttcgaaaggaacacggtcgcgaacgaaagctgcgtcacgtccgttgatctttgacacctttactaacgggaaatatttttctccttcctttggcggacggatgatgccttctaccacgtcaccggtcttaagaccaaataacttaatttgtgactgtgatacataaatatcgtccggagaagaaagataattgtaatcggaagaacggaggaatccgtatccgtcctgcatgatttccagtacgcctactccgctgaggatatcatcgaattcataaggcttttcacgctcgatcactttgcgttccggctgttgttgtacagccggaaggttctcggcagcgttgttctgctgttgtgcaggacgttgttgcatcagaggacgctggttgttgttattattacgctggaaattattattgttgttagcatttgcattgttattgccggcgttgttattgttgttgtcgcgcgggcggacaatgcgctggcgttgttgcggctgtgaatgctgttgttgctgtggttgtggagcttgctcgggggcggcttgtgctgtttctgccttggtcgcttcgaatttgccgaagagttcggtcggaagctctattttttcagaaggcaggtcttcgattgggataaagtcatcatcgtcttcgctggataagatggtgctttcttcgtcgatcaccggtgccgatttcttttgcggtttggctattaccggtttttctgcaacggcaggtttgttttcttttactttcttttctgtctcctgtgtcggagttgctttttcagccgccggtgcaattaccgttttttccgcaacagctttttcttctgttggtttcactatcggttttgcgttttccacctccttgttttctgctttttcagcgatattggcgtctttgcggggacggcctactttgcgcttaggagcagctttctctgccttcggttcagcaacgggagcttctttggctttgttggcagcctcttctttaggctgttgctgaggtttggctgcaggagcattttctttatttttagtaacttccgcatttttggctgcaggtgctactttctcttcttttttaggtgcggctgtgcgcgaacgcttgtttttatctcctttgcgttcttcttttaatttctctgcggcaactttcttagtggctccggctatggcttgctcatcaagaatcttgtatacaagttcttctttcttaaatgagtctgcttttttgatgcctagctctttggcaataacttgaagttccgacagatttttgtcgttcaattggataatgttatacatatagtatggtaagttattaaaatttctgtcttgatgaaatatggacagcattactacagcgtaataaccgcagatatgcgagcatatgttttgtttttaattatgaattagggatgtatgtgttgaatcgtagaatgtttcaacggggcaaagataataaatatttttggtttcatgaacaatcaaacacttttttcagcgtaaaaacgtatctttgctgtataaaagaaaatagtatgacagtaaatgaagctcgtttaatttatttttcgcctacacacacatcaaaacaagtagccgaagcaattgttcacggaaccggtataaaaaatgtcgtttcgatgaatctcacattgcagactgtcgaggaaactgttattcctacgtctgcattagctgttatcgtagtgcctgtatatggaggtcatgtggctcctttggctatggaacgtctggaaagtattcgcggtctggatactcctgccgtattggtcgtggtttacggaaaccgtgcctacgagaaggcgttgatggaactggacgcttttgccatccctcacggattgaaggtgattgccggagcaaccttcataggtgaacattcatatagcactgacaaatgtcccattgcggacggtcgcccgaatgaatcggatttggattatgcagaagatttcggaaaaaaaataatggagaaaattcaggcagctgccggatccgataccctttatcaggtggatgtgcgtgccatcaaacgtcccagtcagccgttcttccccttgttccgctttttgaggaaggtggtcaaactgcgtaaaagcggaactccgcttccccgtaccccttggatagaagatgagagcttgtgtactcattgtggcatctgtgcggctcgttgtccggcaggagcgattaccaaaggggacgaactgaacacgaatgctgaaaaatgcatcaaatgctgcgcctgtgtgaaagcatgtgcaaacaaggcaaggaaatatgatactcctttcgcttctttgctgtccgagtgtttcaagaaacagaaattgcctcagactatcttgtagataatcactcgtttagtcgtttcgtctatccggaagcggttatctgtccgttcgcctatcagccatgcaatgcgttcaccgcagcagagaacccattggcgttctttttggctgatggagaatttgcggtcggtcagataatcgcttatttttttcttgcccgtcatgccaaaggggatgaatgtatctcccgcttgccatttgcggcagtgaatttcctcatttaatttgtctgcatcgaaacaggcggtttctttttcccgtggaatccggaaatcgggtgtgaattctctttcctcttttattaattgatagggaagggtagattcgtcttccggccggatggtttccaatagcagcaaattccggtctttaatgactcgccattctttgctgacgaattgttttcccgactgcccatgaagcgaattggctatatctttgatttgtgccgaattgaatcccagtggatgcaatgtttcaaacaagaaagcttcgggagcgggttcgtccagtaaagcattgattcggataccttccggagtgataatccgtgttttggcttcggctattaccttattatatatagtagctacatcattcaggtgattacttgtttctatcagactgtttttaaccgatggatttatttcctgcatcagtgggagcaggttgaggcggattttattgcgggtatattcgtcttccagattggtactgtctgttacgaagttttgtccgatctgttgcaggtagcggataatttcttcccggttgatgcagagcagcggacgtacgattgccccgtttcgggggcggattcctaataagccggtgatgcctgtaccccgaatgaggttgagcagcatcgtttctacactgtcgtcctggtggtgagctacggcgattacatgagctccgcactcttcttttatcttttcgaaccagttatagcggagttccctggctgccatttctatcgagatccgtttttcagttgcgtactgagtcgtgttgaagtcgatggtatgcaggcggatgccgtatttttggcaaagttgccggacaaactgttcgtcacggtttgattcttcaccgcgtaaatggaaattgcagtgggcagcttcacattgataacctgctgtgtggagtacacgcagcaaggcaactgagtcggctccaccactcagggcaaccaaaagtttatcatccggcgagaataaatgctctttctctatatatcgtataacccgttgttgtatcatatctgcaaagataatagtttattgaggtatctcaagtgaatgctaattgtttttatcggactgactaaggaaaaaactcccataaattaattttttctttagcgatttctaattcgtcctactatagttcctctttcgtgccactatagtaggacgtaaggggaactatagtacttcttgcgtaccactatagtggcacgaactaattgttgcatgtaaattcaatagatgtaggcaaggaattagttacctgttgtggcttggacttttgatgggtttatttagataccgtcagtatacgaaaatcttgctatttaaaaacattctaaataatttgcgtgctcggaagttatgaattatctttgccgaaaatttagatagttatgcgtttatccgaattaggaacaggtgaaaaaggtgtcatcgttaaggtcttgggacacggaggctttcgtaaacgtattgtggagatgggttttatcaaaggtaaaactgttgaagtgttgttgaatgctccactgaaagacccgattaaatataaagtcttaggttatgaaatatctcttcgtcgccaggaagcggaaatgattgaagtagtcagcgaggaagaagcaaaaaaacaagccgaaaaagctgtatatcacgaaggtctgcccgaagatgtttctgtaaaagaagaagatatgaaacggttggcgttaggtaagcgccgtactatcaacgttgctttggtcgggaatccgaactcaggaaagacttctcttttcaatctggcttccggtgctcatgagcatgtaggaaactatagcggtgtgaccgtagatgccaaagaagggtatttcgatttcgaaggttatcatttccgtattgtcgatttgccgggaacgtattcactgtcagcttatacaccggaagaaatttatgtccgccgtcacattgttgatgaaacaccggacgtaatcatcaatgtagtcgattcttcaaatctggaacgaaatctgtatctgactacccaactgattgacatgaatgtccgcatggtagtggctttgaatatttacgatgagctggaatccagcggtaatacattggattatcatttgttgagtaaattgttcggggtgccgatggtgcctactgtcagcaagaagaatcgtggactggataccttgtttcatgtagtaatcaacctttatgaaggggtcgatttctttgacaagcagggaaatatgaatccggaagttctgaaagacttgaccgaatggcatgattctctggaagaccggaagaaccatgaggaagaacatctggaggattacgtgcgcgaacataaaaggaaagggcgtgtattccgtcatatccatatcaatcatggtcccgatctggaaaaagcgattgacgctgtaaaagaggaagtatccaagaatgaatttatccgccataaatattctacccgctttctgtctatcaagttgttggaaaacgatcccgatatagagagctttgtacggacgctgcccaatgcgggagagattttccgtattcgcgacaagatggccaagcgcgttcaggaaacgatgaacgaggattgcgaatccgccataacggatgccaaatacggttttatcagtggtgcgctgaaagagacatttactgacaatcatctggagcaggcacagacgacgaaggtgctggatgctatcgttactcatcgtatctgggggtatcctatctttttccttttcatgtacttgatgtttgagggaacgtttgttctcggagaatatccgatgatgggaattgaatggctggtggggcaaatcggtgacttgattcgcaataacatgtcggaggggccgttgaaggatatgctggttgacggtatcgtaggcggtgtaggtggtgttatcgtctttctgcccaatattctgattctgtatttctgtatttcgctgatggaagactccggttatatggcccgtgcagcgtttataatggataaaattatgcataagatgggcttgcatggaaaatcgtttattccgttgattatgggattcggttgtaatgtgcctgctatcatggcttcccgtactattgagaaccggaaaagccgtttgattacgatgttgattaacccgttgatgtcttgtagcgcgcgtctgcccatttatcttttgttggtaggggcttttttcccgaacaatgcgagtttggtgttgttaagtatttatgcgatcggaatttttctggctgtgctgttggcgcgtctgttcagcaagtttttggtaaagggtgatgatactccttttgtgatggagcttcctccttatcgaatgccgacggcaaaatccatattccgtcatacatgggagaagggagcgcagtatctgaaaaaaatgggagggattattatgattgcttctattatcatctggttcctcggatattatccgaaccatgaggcgtatgagacagtagctgaacaacaggaaaattcttatatcggtcagttaggacgggctatagagccggtgataaagccgatgggctttgactggaagttgggtatcggtttgatttccggagtaggggcaaaagagctggtcgttagtacgctgggtgttttgtatgtggatgatccggaggccgatgaggctagcctggcggaacggattccgataactcctttagtggcgttctgttatatgctgtttgtgctgatttacttcccttgtattgcggcattggcggctattaagcaagagtccggcagttggaagtgggcgctctttgcagcttgctataccacagggctggcctggctggtggcattttcagtttatcagattggaggaatgtttgtatgaataattggcaggaatgggtagtcggagtactgattgtactctgcattgcccgtgtaatatatggaatttatcttttttttcgtcgtacgcgagaaagtgagaatccttgtgatagctgcgtaagtggctgtgatttaaaggatatgatggagaagaaacgtcaagagtgcggtgtaaagaaaaaaagtacaaagaaaaattgctgcggatagttggtagtttcaaaatttgtactacctttgcaaccgcaaacgagaaaaaatggttccttggatgagtggcttagtcagcggtctgcaaaaccgtgtacggcggttcgaatccgccaggaacctcgaagtggtcaaaatgccggatacagcaatgtgtccggcatttgctatttattgatattcagttaattagctacctcttcatttgtgtgacaaactgtgcaggtgtagaccggagatcaattctcacctgcaaacggaaccattgtagatcatggtaaccattaaaatatatctaagaacctatgggagcgacccggataatggagtcgtgtggttatccttttatgttaatcgtgaaaaggtgaacttttctacgaaagtttcagttgacatcaaagactggaacgataagaagaaatgtgttggggcaggagacaagttggcaaaagataagaacttgattatagaaactattctagccagagtaaacaatgtttttgtaaagtatcgcctccgtgacaggaaacttaccagggactcttttcttaaagcatatcatcgcccgactgattataacactttctttgactttgtgacggactatcagaagaaggagtctctaaaacttgaagattctacctacaagactaatttatcagtaataaagaaattgaaggagtataatcctaacctttattttgatgatataacaagtgagtggcttgacgagtatttcttccatttaatgcataagctggagaataaccaaaatacagctaacaagaatatggccacaatcaagaaatatgtcttggctgctttcaacgcaggctacatggatgaaaatcctttcaaaaaatggtcaatcaagaaggggcttccttcaggagagtacttgtatgaatatgaactgcagaagttgatggaactgtatacttccggagagctggaatacagatatcacaaaactcttgagttatttttattcttatgcttcagctcattgcatataggggatgcaaaagggttggctttagaacagttctcagagacaactttcacttattttcgtatgaaactgaagaagaggaagccaatgccaatccaggtaccaatctcagatccgcttcggcagttattaagaaacattgttggtactaggaagaagggacctgtttttgagaagctgtgtgctgatcagacgatgaacaggtatttgaaagagatagctgctattgccgggatagaaaagcatataacacataaagtcggcaggcatacctttgcaaccatctttttgcgtaagacaaaggatatcgcttctctgaaggagatccttgggcattcggatctgaaggagacattagtatatgctcatgtgttgaatgagagtaaacaagaaggagtacagtgcttcaacagttttgccttttaaattgtactttcgtacggaatggagttatttcattgatctctagataatagcaggcgcactatttttgtacaatttggtacgaaaatagtgcgtctgcaccatttatgggcgaatcaatactgtcggacaatatccaaattcctgagctgcatcaaaacagggacacattttgatccattcgctcgactctacaatcccgttatcattcagatccggagatgtgtctcgatggccgagaacttcaacaatgggatattcctgtttgagtctcattacgagatcacgcatggattgtttttgagcatcggtacgagtatcggctgcttgcccagtcatatcaagacctccgatataacaaattccaatgctgtgtttattgtatgataaaccggatgatccttttgtgttgcagtgtgctccctcgatttggagagatctaccttcttcaatggtaccgtctaaatctaccacaaaatgatatccgatttggctgaatccacgtgcacgatgcatacgatcgatgtcttttgctttaaaatcttgcccagctttagtggcagaacaatgaatgataattgagtcgatgttgttcatttgattttttcttttaattattaatattacctttgcaccaattctgtaagggaatatttcccttaatgtttgttttgtttgtgtttgtcagccgctaactcgtgatgagcaggcggtttttcttttaatagaagtgcatccaagcagatactttgcgatccatgattcataaaatacctttttcataagttttgtttttagtgattaataatgtattatttatgtcctggtactttctcccagactgtcagtaataacataccatacgcatccatcgtagcgactaactccgataaactgtattactcctcctttacctgtttctatttttgttactaattttagtccgtaaacatcgacatttaaagggtgatacatccttcctataatctcgacgataggggctattcttgtttttacaggattatcatagacggtaaggaccgtaccaatatacttttcatcagtaggtaaattgagagttagacgagtagctgtatcttccccttttgcttcgagattgaaatagtcagatacggtatattctccggtagcagcatttgggatagctccttctttaaaagttttaaatggtattttcaagaatccggagaatgttccgcttgtggcattaatttcaccgtttactgtaacttttgctttcccattctctaccgatacaatgaatttgttgtctatgtttataccggtggtcataatggcttcaactaaaagttggccgctaatctggactcgttctccttcgatcttgattcctgattcatcggcattgatagcagcaagtatcgtgttgggattaccgtccttgtcggtacccataacctcaaccttccactcttttgcgttttgggtgacctgggtaccgatttctttaatgatatctccctcggcatcagcaacggcttcctcgaacttggtagtcaacctttcagcagtcaagttaagctcagatttgcagctttctgttgtcacgtcaatctcaccttttgctgatatcgttttcttctgaacattctcttcgaaggttgcggtcaagttcttagcggtgagttctacttctgatttagcggcattcttagatgtcgtgatagctccgtcggcttcctttaccttttcctctgcattcttattgaaagtagctgttagttcttccgctgaagcctgaatgtctgattcagcagattcttttttatcagtgatcgctccggtcgcttcttctgttttttcttctactgttttcttgaattgaagatcaagctgttcggcagtcatttttagggatgattctgcggatttcttcgcttcggatatcgctccggttgcctcttctgttttagtatttacgagattagtgaatgcaagtacaaagtcccttgcagtgagctgaagtgtaccggttgcttcttctgttgctgtagtgatagcacccagagcattcgtcgtttcagtctcgactttatgggtaaagtcagcagacaacttttcgtaattgacattaaattcagaagaaagttcttcgattttggtcacatgttcacctgcggtggtagctgatccggcagcagagctagcagaatcagaagcttccttcgcgtacttgatgacttcttgccatttgccggtgatcccatcctccctgatttcgaagtcgccgcgtatctgaatctcacgaccgttcaactcgtcttcgattgtcttgtcattgtgcaggatgaatgtaccacgaatgatcactccatcggcgatcaaaccaaaccatctcttaacgcttcctacagcttcctttgcccaggcaggaatcagaccgatatctgcatggccaagcgtacatcttacatgttccggatcggaataagccgcccagctgtcgataccgtcataaaaatactggcagtttgtccttgatgaaatacggatgaatgattgacgttctgcatcaactatgtttcctactcttgcaatgatcatgtgctggtaagggatactgtcaccttcagcttcaaggagaatagactgatcgctgcccggatcagagatggcggtaaactgttgaacggagtaaattgtgccggtgttgccgggattatgataataccctatcaacaggtcactgtcggcaagcgggttattgtccgcttctctcaaatccggatagacagtgaatgtcccgtctccgttatcgaagtaagatgcgatcttgatactgcttgtgactatttcttcatcctctgttacccggatgcggttgtatacaaattcatttgtgataaacttctcacgtacaaagacagatttaaactcagcattgccgagcttgtcaatcaaccagcctgatacgcctgatacgaatgtacttacccattcatctacttcttcaccggcagcgttcagtatcttcttacctgttgctttagcggaggagataaatccccaaataccggtattgattagtcctgccattattctattcctcccattattcgtataagcattgccacctgcttttctagtttatggtagtcagctacggtgattctctttttttgttcgacatcagtttttggttcatcctctatggtttctgtttcttcaatatcagttacctcatcctctagcggtgtatcttcgtcgataagaacggtctcttggtcagcaggatcatctatctcttcatagtgttcagggagttccaaaagcggttcttctagtttctcacctgacaagtagtaggtgtatccgagatagatttcattcccgaacagctggctgtcggaaattctgcggaatactttgccttcttccgcagtgatatggttattatttaattcgtctattttcatattatacctcttcattagggaaatcgattgcaaattgactcataggcttgatgctgtcggctaattcagtccaattagttgctgttttatatgcttctacagaatcattgggaacgtatatttggaaccttacagagatataagacgaagcgaatgttcttgcgccaataattgggggagtctctactgtcgaaatgaaatatttcatttgacgacaataggcaaatgaataatttcctaaattcggaactgtagctggaagtatcacatgtttcaattcatcacaggtgtaacagaaatgctccatctttgttacagggcaattatcaagcaaaccggcaggtaaaacctttatttttgaatattgaaaacatcctctaaagtcaaacgctttcttattattaataaatagatttgctgggaccgattccaataaagaacgtgagaaacaaccttctggattactccaactatcggctcctccaaaataatatgcattcgtacaatagtagaataatcgttcgggaacggaagtgatttttgtattagcgaaacataagttgaaatcagaggcgcctacattgtatctaaataaatcatcaggaattgaagatattaatgttccctcaaaagctgatttgaatgtgctggcattcgtgcaatggtcaaataagcctacaggaattgatgagattagggtattcctaaatatacctgaaagacttgtcgcagctacgcaattgtcaagcaacccttgcggaatagatgttaaacttgtattattgaaacaataggaaaaagactgtctctctgtatcgtttttcaacacaagtcctacatacttcaacattgagaaacctgagaaattcaagttatttacattactatttccgagatcccaatatgcaacaagagataaacttctttttgtaatcgcataggtcacatcactacagtttttgatttctacctgatggaaatctgagttatcatacgtgtgatcataagtcagcttccctggcccgactgcatgatcttctgttccgtctccccatgatatgatataatcagtggcgtctgaggtgacatagagagaaatgttctctccagtaacaagcatctgaatatttccattctctatcggtttgaaagattcaatatcaagcctcatggcagcgttgactgtaatggcggttaaactaacagtaacgttatctgttacgctgaaatatccatttttagatacggtgtattcatgagtttttttgctacctattaccaatgtcgtttctccggaggcatcagtaatccctgttttcccatcacattgaatagtagctccggatagaagtacagtgccgtcttttactatgaactttacttcgaccgtgtttggttctacatatacagttaaggatgttgcagacgtcccaacagttatattacctgtcttttcataatatgtgtcatgggtaacagaatattcataggttccttttcccaatgataaagtgcattcaccgtactggttagtcgttcctgtcactccattacattttacggtagcaccttcaatgagcgatgaattgtattctacgataaacttaacatccacgacgccatatacatacacagtgtttgtagtatcagatgttatggaaccatatgagaaggtattgcttgcatatccgtatgcagacacggttccggatatagccgcacctccacgcggtaaagtaacatatccgtcagcatcagaaatgtatgatcggtctccaattgtgacagtagcaccttggacatataccgattggttataaactcctacacgaatctttcgtaatggaatatatgtcacagtataactctgagaacgtgtacctgctacaaggtatgaacccttaaaatcttcgtgattttcacatttgaacgtaaaatcaatcgttatgttgtcttcagaagttaccttgtaggtatattcgtttactttctcaacttcgtaggcgcattcgaaggctgaattagcaagagacttacgctgagaagaactgaaggtgaaagtcgtcacaggagcaggtttcaattgaccatatgtgatagctaattcgggaaatgctgccttcagtttgttgatttgagaatcggtagctacagagacataacatttaccggtgatgatcgccttgtctacattgttgccgttttcgtccagtcctttcaaactgattagttttatgataggatcaagggtagataatgtccagtctacaccgatcaagcgtacacgctctaacttcatagtatcaagcgcaaaacatctgtcaattatggataagacattagccttgttggtgttctcccatctgattgtcgaaagattccgtaccccatcaaggattaatcccgcatcagtcagttccgtttgatttcggaccgttaaatttgtaatggtatccggcaggtgaagcaacgtcaagttaccgccttcaggcaatactacagcggatgttccggttccttccgcccatatctcgcgaatgttggaacataatgcaaggtctattgcttgtttcaggttcggacagttacggatatccaacttgcggagcaggttgtttgcaccaactgagagcacttccatattcgtgtttcgatagccttccgctccggatccgataatcagctccaccagtttggtcatcttcgatacgtcaaccgaaccgggatacaaagaggatatatcccccaggctgctgatctgaccggcgccaaaaatgatcgtttcagtatcgttgaactgaatggcaggagctttaatatgtaccggtacatttttctgtgaccgaatgccggctgtatatgatccgtactggacgttgacatactgcccggcatacgacgtgatggtcatatccgcattaggttctactccttcccactctgaaggggtgtacagacgcagagttgcgaagtcattcttatagtctccggcaatgtatttagagtccatgtatttgaatcggttgtacagccaccagcgacggtgcatcttgcggcttccctgggcagcatacaggtatgatccattcccttcatcgagtaatggacggacatacttgtaccagctgtcctcattgtatactgcttcacaccaggcatctccctgttcggtatcgaagaagcggatacattcttcataagtgagcagcttctttgaccgcatttcagcgtacatggctgcgatctctttagaatatgcctgctcgatgttgttccagagagttgactctgcaccgttccatacatccttgttaccgatctgatcgtggtactcaaccgtatagtcaaatgctgctacgccctcgttgttcagtccgcacacagtatcattatcatagaagatgcagatccagtgaattccgtcgaaggtagtcaggaacatattcttagcacgctggtcgaccatcgcaaagagttccgttatcgtgtagtacgataacatgaaattcatgtccaggtactgatcagcttcagcccggaacttcgtcgggttatcctttacggagacaagccagtcagtcaggcgctttagattcgtgtagtcttcgttttcgtccggataacgagcttcgaagtctttcagccattctatattaccttccgagtcgacggtgatatagtccgaacgtttgaagagtacacggtcggaagtattgttcaggatctcccaactttcacagccggccttgaatccgaatgtttcattcgttgacttatcgttattgaagttgtatttgcccaatgatgttctctcatcatcttctgatgtttgatgccacatcaccgacgggcgaccgttgactgtcgtccggacgcggggatctgccttctgtgcttcagtaaggaatcccatgccacgaagaatatagtcgatcaaacgggccataccggtattgtgtacaccgctagattcggcgaagtccgctttgaagcagaatacgtttacaggtatttcttcttcgaagatggcaactttatcggcatgttcaccggtagcggtcatggtgaatccctgcttgcattttgtcttgaagttctttcgaggataccactgtgatgaagttccctgtacgtcgatctctactccggttgctacccagctgcgttcaggatattccctgtcctcatagacaagggtgacagtcttcttgtctcctttgaaagtcggaagctcaccgacgatggtgaatgagatattctgattcgccagcttctcatagctgagattcccatagtcgtcataaatgctgttccgggcatatagcttgcgcttcagttcaagattgtccatatcggcaatgtaattgtcgagaagctgatagcggtttaaggcattgtcatagacacggatattaaagatatctgcggtacagtcactgctgccgatcgagatcccggccggattgggctgagtaaagttgtcttgttccggatactggatcagtccgcagatctcaccgttgatgtagacgaagatcagccggttctccgctttcttttcgatcacgaaggaaatccggacacgttcatcctctttgaattgtgtttcgatagaggtctgttctgatctgaatatagctttctgtgcagtcacttcaagtccgatgccggcattcatgcagctgaggatgactgaatcatagtcggtaacgtctctggtttcaaattcgaattcgattgttttgccggtagaacggaagtcgttggcaaaggagttgtaggggatggttacacgtgcatcgccattaacgcgaagagctacgaatccgtcaactgtcttgatccatccgttcgttgcgtagttgaatgcggtaagtacagcgaagatctctccgtagttccagatgtttttcccttcttcgttgttgctgcggtttacggaagtgaggaagagaacgagatccgcttcctccggacgaacatcgatctctgattccgtaaccgtcaggttgaatgttttggtcacagatccgcatgctattttcagttccagttctccgggagtttctgcccggtaactccatgtttgtcgcgtgcggtcgatcgtttgatcactaatttcgattccattagctgacagggtgatatcacttgtcgttgtagcaggattataaacgatgtagggaatcaggagtgtgctgaattgttcgacttcggcagtcctgaaggatgacgcaataaccggtgtgttgtttccggatacaatgctgataatatcatagcgtagacgatcgctttctacttcggtatcgttgatcgttgccgtcgcataaacgtcgagcgtatgtgcaccatgcgcctgtgccgggattgaatatgtctgctgacgattagatacagatgtggtgtaggtacccgtttctttaccatcaacgacaaagtgaatggttttctctacggcaccaagcggggtatatgggaatgagatcgctcccacataggcttttgaatcatcgaatgtagacgttacggcaatgcttaccgcgttgatcttgaatgtcagcttgcgggtagctccgtaactgtcggtaacttgtacaacgaggacgttatcaccgagtatcaggtatttgcctatattgaatgagacttcgccttgattgattgtttcggaggctacctgcttattgttcaaagtataggttgcgataccttcgcccgtttcctctccggacaaggtagatgagtatgtgtattttatcagtgtctccttaccatgaacggccgttgcatttgacggagtgacaaaggcaagcgtgagctttgttcctccgccacctgcggctgctttcacgggatagaatacacctgctcgtttctgcatcatgtagttgccgtccggaactagatcgaatgattcatctgtgttgtccatctcacctagtgaggtagaaccgaatccgctgtttttaggaacttctgttaatcctattgccataacattactattttcgggattttctttttctgattcagtaactccataatcggtgtcggccatcacgacgacaccaccggacagccgggtcattttaccgacatttagcccaccttcgatgtcgcagccctctttggaagtaaagcctttcttgaaagtatctttgatgtctttacgtgcataacgatcatcaccgaatgattgagatgcgacaggctcaagtttgcagtgtacgcgcttgtctgccaatggaagtgattcgtcaagaacaaggatataaacatttgttttcccattctcttttacagtaatcatttgtccgtcataaggggcataagctacagtgtcgatattttgcgcatatcgagttgctttttctaaagagttccaggtcgatgtagagtcgatagggagactcctggtgcgcttgtattgaagatagaaactagctcctgcgatgacaaggctagaacgtggtgatacgttttttatttcagatagatattctacaatttcaacttggtcttccatactcagactgttttaaaagtgaatgtatccggatcgttaggcattgtagcttctgcaatccacattttatattcaatagctttactaccgttggccccttctaccataattttaatcggaccttcagttccattttcgatgaagttgccaggataactggttagggtaagctcggtgagcatgtctgcagggatacatactgcaaacatagaccatgtaccaatcggaaatttataggtaccgggaccggtatacagtccgtttgaactgagtgcccgtactgcatctgatgtttgaggcacagtattgcatacaccggcaaaccatttacgtcgaacgttcacactgatcttattatttaatgtaatttgcggtaatactccatcagggctagcgtcgtagacgacggttgcagcgtaagtctcctccattgtatagtagcctgtcaattgccttattgccttctgttccccattaacttctgcagaaaactctagtttattctcttcgatataatcataaaaggctttactcatggggccgttaccgtgtctgttggctgtgtaggttagctgtcctttggctgtcccaaactcaacgtcgttggacgttgaaagtttacctgttaaagatgcagactctacactggtgagcatcgtcctgaagatactttcgtatgttgttccttccttgagtatgtccccagggtttatattccctgtcttgggcgaggtgacgcgaatatctttggacaagcttccaccggctttagccagtgtcttgtacctttcgttcaaaaagtccaagacaccggctagttgctggttggttacactgcctttggtgatggccttgtctatgtgatcaatcagagagtctacaatatcttgtgttgtactcatccttaattgaattgtttactgaaaacatctgtatgaattctcggattattgaaatcattgctatttaattcctgagtaaaatgtttctccgaatcgcagaatctaagtgtaatgggtagactttgaggcgtattcatattctttgctattgctaaactatcagcagaagcattgactttgattcctctgtttccgtatcctataagatagatctcatcactagagagcatatcaagaataaacatcagttccttttctgtcttgaaaccagtctgtacatgcagattgtctacagtgtttactctctccctgctttcagtatagtcatttacttcttcatcatatttcccatacacttcatcttctcctttgtcttgatctagagtgggcttcccggtaacttctatgcattcatacgctccataactgtttaaaaattcgatatagtatcgttccttctctatgttagcaggagaaatgacgatggtgactgccttgccttctactgtgatgatttcaaattgactggcaagcatattattcttgctgaaaaaatattttcttaaggcttcaaggttaagagcataacaggccccgactgtcagacccgaaataacagtagaaataccttctgctactttaaccgtaaaagtcgttactggagcaatgaataataatggccgtatttctgtttcgcggatagacaggaccctttgttctgtccgtgtagacataaagaagttaccggcagcattcaatagcttcatagtaaaaatgttgctgcctgtctgattcagatgcctcatagctcttttgctgatcccaccgagtaatactttatgttgcaaggtttgtcggtcacctgtctgattattgacttcgattgtgtattctttgagattgctcgatgttgataggatgatatcggtttcttcacccgtatagtgggttggagataaaatagctgataagatctcatcgataaaaacaaagaaatttccagtttctccggatccttcgaaaatgacattactttgatttcggataacgtaattgacaggggatgaagaagtgatttccaactttaccggattccctgataaagccatcgtgcggggtgaaattgctgctgttaaactcataattcaaactgtgttcttacaatgttctctgaggtcactactacaaaattcaggtcggccaggagagaagttcgttcaatgcagggagatgacatcaatgaataaaagtcttccattgttttgtctccattgcctggtagagactgaaacttcagaaatactccggagacattctttatttcaggagctgattgtattgtttcctttttttccatatgcaaatgtgtttgtttttaattgctgtataaaggacaagattacatagtgactgctttgatcccggcttcatattgaagtctgattgaatctatcgaatcagtatttgcaccttcaggattatccacataaaacgagaaccagtactgtaattcagcgtcataagtatccagtatttccttttttcctagtacttcttctttagttggaggcagatacgaactgaaatcatctccggaaggttgggttagtatctttctgtctaagacattaaatcctctgagatcatatcttttttcaagttgactctttacttgtgctgcagttgcggcgaaggcattatctgcgtaggagacaattacccatttagtcgtttggggtatcatttttacaataccttgttcttgctcaagatcaaatggttttaaaagttttgtggtacgaaggttcacttctgcaggtttgttcacttgatagggtactgtgtgcttggcactctcaatcatcagtttctgaccagacaataagattggccggctggtatctatctgagttagtgctatccgatcaagattgattttactttttagagtatggtttgcatgtcttaagatggcatcccattctttaaagaattgattgaaagctccgtcctctccacgaaagaccagtgaatatttgaaagtgttcccgtcgttatcacggaaataattacctgcaggggtgcggcagagtgaactaccatagtaatatcctaaaggaacattcttttcatcagtagccattcccatcgcaaaacagaagcaaagcggagtatctgttttttgttcattgactttagctccccggagtgttgtattgagattcactgttccggccatgtattgcggaactagtaaattgttacagaacgtcattggtaggcattcatctgaactggatatttcttcgtattcaacgttggccgttttcttatcccaagcaaagaagtcactggataagagagaaacgttttgggaagctatgttacgcttgtagaatcgtccggtagatgcctgataacaaatatatgtgttatcgggaacatactcaggaggtgtgttctctacttctgtgatgattcctttatatttatcaaggaattcttcgaaagattccgcatccgtataagcttcgtcaaatgaagtgctggcagataatcttatttgcttgggctgttcgtaattgggtacaggatctgcagctttcagttgtgaccagtctgcaaatggggagctggagaacgtgtctttcagtaatttgattcttgctgttctattatccccattcacgaagatcctggcaccagttcgacagaatattgcttctagaaaatcgttaatcgtgcagtccggcattaggtctttatagtttatttgacctgcgactgtggcatctgctacattattaagtactaccatttttttgagctggtagtctctctcgaatggattctctatgagttcaaaaccatatgctgaaaatattaattgtaggatttttgaaacacggataaaaggagaaataccatatcctgcgggtaacttgacatctgcgacactgcctgatataaccattttctctgtacgtgcatttttcttcagctcatacgcattacctattttttgaatcggatttatgaattccgggtaagcgacatcgtctgctgagtcattctttacttgtatggggaaaacataatagtcggctggaagattatatttcataacattattaagatgttctgttaaagcagtaatgccacctgatggtttatatatgggtaatccgggtaacttttttaatgatatattgttccaggcttcatacattaggctttcgtcaaatccgatgttgctgacaatccctgattctaccgatgctgatgttatattctgcttgcctatgcgacggtatattccatctgcaataacagcctggacgtctttagccggtgcattagctatatctaagcgattgatatgatcaactatggaaaggttatgcttcgttcccggtaacgtagcagctatggtctgactccctttatctgtataaataggggaggtgatttcaacttccatttcgaagtctgtaggagtatcgtatatccctttaggtgttttgatgattagtgccatattattgatctcctcttgtgaaaggtttttccgattttagtttgatctcttccgcatcattgatatcggataagagaacgtagtttttcgaaggcttgcctagtttgtccatcacttgatccatcttatccattactttctctagtttggcctcaaggttgttattgggacttggcggagtgggtgagtctgtagagtggctgatggagtcgtaatttccttctgcatattgtggcacccttccggatcttgcatcattgattgcttgaagtactacaggatagttgatatgtttttggagccgggacagatcttcagaattgataattaactctgatccgttttctgatataagtgaagtacgtttgacgatgcctgtaggggcttcccctatataggggatatcgtgatagctgcgtccgtcttcagctccgattacgtcatacttcccggctgctctttggtttattttatattcagcctggggagtactttctgtggaggaacttccactatctcttctttttccgataaagcctttcagtgtagatttggctgtggcgatacctgccgtaataagacccgcaagtatagctccactcgctattccccaaaagcccttggaaccaatctctttagctgttgcttttgctgcttctgcagttcctattatacctaggtttacaagttcggcattaatgatttgggctataacatcaaacataatgtcaatcatcgtatctgcgaatccttgcatagcattttcctgcccggaaatgatgttccctagagcattaccaaattcttctccatattgttgatagatacggagtctttcttcaaattcctgcttgtctgttttaagtttgttttttgaattttgctcattggccttttgatctttttgtatgcattttaccttataatccagcagctgcttctctacttgcttccgttgttctgcatttagtcctgcaagagaaagcatacgttccagatgcatgatggtgagctgttccatcgcatcattgtatgcagcctcggaattaagattctcatccttcccggaagcatataactcctttaattcctgttgctgacgttcatagtctattttttcttgatcaatcagctcttgggtatgttctttttgcatcttcagcttcagatcattgatctgattttggatctcaatgccttctttagattttgtaccggctattttcaaagaattctctaagtgttccatttgaagacattctaattctttgttaagttgcttttctgtctgaagggtttcatctcctccttctaggtacattgcttttaagaaggcttgtttttgggtatatagtattttttctcgttcgagtcgttttttaagcgctttttcatcatcatcgtcctcttttgtggtagaattgttttttacaggctgaggtttctctgattcgatcttgatgagtttttctctggattcctctatatgttggtttaatgtttggatttctcgatctaatgaacgcagtttatttgttcctttgtttatatattcattgagtacattatcagcccaagcgtcagtggtaagtcccaatgatgttttgaaaccatttagcatattggcagctcctgcttctacatcagaccaaaagccgttgtcaggtccgtttttaccgagatcatcctttctatctctcagttcactaattttcttttgagtttgttttatttcctctagaacaagaagactgtcaacgtatgaatttacagcagcagtagcctgctccgtatttatagtttccaaagataaattgccaaggtattcgggagaaatctcgtttagcctgcggatagctgcttctcgttcagctttgctcaagttctcgttacgtgcaacagataagagatgctcaacctcattacgttcgtcctgtatgttgctttttgaattatttcgaatctctgttaggcttttctcaatacgttccgattctgtcatttccttattcatattgcttaatgcagaaataagagtaacaatgacagccgcgactgccaggtatgggttgcgcaacatgacagcatacatttctttgagtgtagctattactttctgattccaaaacactttgagcttttcttctatgatctgagctttacagatgagaacataggttgctattgtagctgttaatggtatcaatatatgtgaatatcgtgcaatgaattcaattaaagaattgagtgcccgtacgaaaaaactggtagcggtaatggcattagacatgaggggaagcatcttctctcctaattgataagacacttctttaaaaccatttttagctttgtcgagacgcgcttgtactgtattgttctgcacattaaattcgttgataaccgatgtaccttctttatatgcggtagtagcccgttcttgctcttctcggatgctagcggtattggcagctaaagtatttaagactccggcagcgcgtacaccatcaagtttcatgtctttaaataaaggtgctagttgctgtagaccgcctttacttcctaagttttctaatagctgtaggagggcttcattggcatcttccttaagtaattttgtaaaatccttaacatctttccctgccattttagcgaatttggctggttcctggtatactttcatgatgacagtctgcagagcagtggaagccatttctacttgctgcatatcttgatcaagcacagaggcgaatcccatgatttgtgtttgtgaaattccggcttgttttccagttccggatacacgtgcagtaaagtctacaagatatgattctgcggcactgctattctgagctacttcattgatggcactccctgtggcgagcatagcaccgcgtaatcctagtgttttatcttcaccaaacatttgtgctagtttaccaatattcttaactgcatcttctcctagatcctcacccaatgcaacattgattttatcggcagcatctacgaagtcaagaatatcctgctttccttgtataccgaggcgacctgcatcttgtgccagctcgttcaatcgttcgcgtggagtccgggtatctatctttttgagatcttcattcagatccttcaccgcttcatctgtcatcccagtgtatttttttactccagccatagcctcggagatttgcgcatagtcatcaacggaacgtcgtatagtcatagataatcctgtaacagaggcgacaactccaccgataagggccatatatttattgacgaagttagcggcctgcccccaaacggttccctggcatcccacttcaacgcgcattgctgcttgagcacgagtgagagcttcggttacccgtcgattctgttctaaggctactgagtgctgttgtgtaccaggtattgcatcccggagctgcttacgaaccttggactgtacagagatcagttcgttataggttgctccggaaagattgctcagaatacgttctgtttctctgatactttgtttgtacttttcaagagtcgtcgttttcttattaatttcctgctgaagttttcttgattgggtgttgtagttagcttcggatttattgagagaggctaacttgttttccaatttttggatagcagtttcgacttgcttgactcctaatgcggcttccgtgccatcaatgtagattttaatactacggttaagatcgttgctcatagattatttgttgatatagatgcgtgtggcatcaatgatcattgaatcgaaatagttggtaatgattgtttctagttcggggattcgattacggacaatgggatcgaaccattcgtatgctttgcggtttcctgtaccctggctgccattcaatgattcaggattggtatgccggacaatcccggtacttacctcgatcccgccgattcgtttcagtttcgtccacttggatccagttgttcctccatacccttttccggctcctttgtggatgtagatgccatgacggggaaaagaaaaaccgagtttgttgatgagtccatatttgtcagtatacattctaggtctcaaatcggtggccacacgcatgctgtgagatgaaattgatgcacgtagttgggcagcgacagagttcatccatttctgtacgtctttattgaatgcgactagccggtcagcgtctttagccatcgtatatcgttctatttcggatacggtttctatgtgtatgagctgtgacgagcctttgcctgccagattgttggcgcggcgaacagcggcattataacgtctgacatcggaacgcatatcccgataatttttatagaatcccatagattagtcctcccaaaaatcagagttgataaaaaaatcttcaggttcccgcagggagaaggtaagtaccactccatagaagttgtcacctataggtcctattccgttgatacgtgtcgttcggctaatggagtatttcagagttggatcgtgaaagaggcggttacggatttgcttggcaatgactttacagtctaatgcggcttgattgattgtttccggacgtgacgaatttgtgttgcgtgcgacgatgaatgaatattcattacggtcagtcaatccatctccattgttgtcggatgattcggattccataccatcaacagcgataaggaccattcctgtcacatttgagagcttatcctcaaatccgaataaatcttcaaacccaaaggcggtgaagaagtgaggatgttccggggtgtgggaaatcggtttgagcttattggctagaagctcgccatattcataatgagaatattgttccataactttgcaatgttttggttatggagacaaaaatagcccgctgtgggcgggctataaaggacagttactttgctagtaaatagactagaagtagtaataacagggctatgaaaagccctttactcattcgatatcgttcaggtaattcatctgaggcacttttatgaccattatagtcccgattatataccgtaatatttttcttgcgtcctgcagtgaatgctagagtcaaggctattattccggttactatgatgataaatgctatcatggatctaagtctttattattattgggtaacaaggtacggattaatccggataattgcaaggcttcatgtctattcataacacctggaatttgaattggttgaaaacataatatacggatactaagttcaatatggcttgcatacgggcacgcttagctcggcgatggcgacggctcatagacgacctccttttttgaacttattcctaaaatcgaacgtgattattttgccaatagtttgttctctttgaggtgatgctattttctttttgtagttggtaagcatctcaataacggtatcgatatgattctctctgatagatccgatagtcgtggttacggttccggcatagctgccatccggtctgagaatcattgattcgccttctaagtggatgtagcctgtctcattattaataacacgacattgagatggtatgattttttctatgtattttatcatggctgatctccttttccgttaaaagtgatattaactgtacctccattggcgtagattacaatacctctgtgtgatttgttcactcggagttgttcattgccttctgctacttctaagcagatattggaaagagctctttgaagcttctctacggatatgtagcgtccgttgtcgctttgttttttgtgtttcatacgatgggtttttgacgttttagtcgagaatccgctcgactagcggaagtacaagaacggctgcactttcccgtttcgtcaaaaacccaccgtagttcactccgaagagactgagactaaagtaataggaaaggcagccgtatttgtttataaataaacttcgactattttgtatgtgagtttactaatagcatagtgccaatagcaaacttatgggcataaaaatagcccaatttcatattgagcattatccgttgctcttcgttcgtgatacctcacgatgggttttgactctgcaaatatgaggattatatttgagagtgcaaaaagaaattcaaaaaataatcattcctccgggtttagttttttcttgatgttgtccggtaggtcattcatcatccttatcattctatcttgatattccttttctgtctttgttgggtggcataaaataaataagaagccaattagaggactaaagattaaagcaactaaggatgcccatccagtgcttactactcgtttatcagctgcatgagctactggaatcagtgaaatgaggttcactagtgcgtaaataaagataagatttcccatgattgtataatattggttttaatattaaagattagtaattggagaatgtagcaaatttcccattttgactccacatggacaaatccccatttttttccactatacaatattcattatgttcgttattaatagcttcatatcttttgagccctttatggtttaataggcgagcttcttctatatcagaagaaccatccccgaatgaatctttgatgaaatactttttggtttttaggtttttaaatatagttataatatgcttatcacttccaggacgattatctaaccatcttcctatctgttgtatatcgctattgtttttcggcgacttaagtatcttcaattgttttttaagatttgcattttcggaagataaaagttcattttgatgttgtaatgaagatacttggtctttcagacttgcaatttcggtcgaagatttcttacaggctgctaatgacaaaagcatcattgataataaaaaaagttttttcatttgtgtggttttaatttgttacaggggacaaagataagggtaataaaattgaatgtactaaaataatgttgtattttagctcaaaaatagagttagatatggatcaggagcaagaaataaataatcttaagcgtaaactattagatctttcgtatgactattataagtttcgcgtgtctctttattataaagtaatctttattttattattccttttactaggtctgatagtaggattcctgttataaaagataagatacttaatagtgttgttattacaatgctgatcgtctttagccttaaatatctggatttcatgatttcactttcgcgctgtaactttatagctttttgttggtttgcaatatatgcttgataacttccaaaagtttggatggcttcatatcctttcggggtgatttcaactaatgaatgtacttcgtccggttcttcttcagtgattaatccttccatgactaattgtttccggtagctaataagttgctcaggaaataatttagtttgtagttcatccatgatgtcatgttggatgcgttttttgcgaggatcacgatacaggttacttaatataatacctttaaaatgggtttctaatggttccataaatatataaaaacgaattccttatgtcgtgtgccaactggaaccacccagccacccgattttacgggtgcacgacataaggaattcgcgagttagtttgttttggcagttgctaaagtacattctttttgggaatctacaaacaaaagtagagttttttgctctgcttttgtttgtagatttaatatagactgagaaaattatattaattaagaacgtgattattctatattatagatcgcaaaattttccagtagattaattctttgagtaaaataatgtaaaggtactgctatattacgttgagatgtccattctaaagctgaagacaaaagttctttgttgatcgtctttacattaaaattgattactagatttggttgagaaggatctctagttaagagtttatcgttctcatcggaattttcatatttgaaagtataacatcttaatagcaaggctatggtaaagtgaaattgtcgactaggagaagattcgtatttttttttaatctgtaatatttgttttggaattatactctctaattgatctgtaagttcttgtatagtataactttcgtgggttattttaacataacaatcggattcgcaaattcgaaggtatgttaatagacatattaattcagcatatatgacttggttatgtttatacatattcaaagataaacgaatatgagcaaatattttttctatttgtcttagtgatagattcttatgcataaaaagagtattggctatagtcaaaatggattcttccatctctttagtgcctcttgccttttcatatgcttcgaagccatagtaatcatataaatagctacagaacttttctacatcgggatcaggtaaagcatattcaatatcaataaatcttttaagatattcattggcatttattaggtcactcccgtaatatccacgtatggagttacttaattgttccttatctatggataagacaaatataatattaggtatgttgaaaagatgttttattcgttctagtacctttacggcataatgtgggttacaccgatcaagctcgtctatgataaatatcaatggttttttttcgcaaacttcatttacaaatatttcgagatcttcccgaaattttagtagactttctttttgcctttcataattgtctatttcttttttcaacatggaagatccttctccgatacaatcgtaaagaacctcaactacttcttcacctgtatgtttcttaattactcccttgaacattgcaggaactgcctttagcacaattcttcccgccgtatttatcatggatgatgctaaatcctttgttcttttagaagagtttatttttgtaagttcgccaattaaacctacaagaggatctgaaatgaagtcattttcccaagcgttaaagtataatgtgtggaatttgtccagttcaagatatgccttccacatttctacaaatgtagttttacctgttccccatttaccgtctatagctaagacaaatccttttttgtatgtagtgataatagctttaagtacttctgcgtacttttctcgacctaatttacaatttagaaaaggctggtcagccgggatttctaattttccaagtttacaattcatagtacgtgtttttaatttgttacaagtgcaaagataagaggaataaaattgaatgtactaaaataatgttgtattttagctcaaaatattgtaccatgaactgtattcttagatacttcaaaagtaaaagggagcggaaattacgcaaacgctgcctgaaatatgccttagagacaatagaaggctctaaggcatgtagtgatatacatctatctatatgcattgcgctattatgagtatatagccacagataaagtcaatcgcaaggcttcttgtagggaagcattacaggaatggtgaactgtattcgattggtggatatattctgattatcacttttagaagaagctcccatccctataatacttgacatgatgcctattttaccttctttgccatctgtctccgtgacagatagacttaggtcaaaatctatatctgtaacgttagcaccagttcgtccaatcatactacgattgagagattttgcatataaaggattgactatggcttttccttcttcaaactcttcattcaactcttctaccgattcttttatttgagtaattgtcgatttgataaaatctttaagttccatattgaacgggcggatcccttatcatcgcgcgccaaaaggttatataaagaccttaatccgattttacggattacacaatgaaaagggattcatgtttattcattaattatttggcaacggctaaagtacaaaagtttctttgttgctccaaaagaaaaatgtattttagctcaaaaaatatatagatcatggaaagactcactgcagaacaattaaaagtaatcgatttatcgcttatagaatggtattatgaacaggctatggttcgccataatgatcttgtccgtgtagaatctcttataactgaaagaggatatactttgtttgctatctattttggcattttaacagctgcaataggatatattctcacgcatttgagtgtaaatgatgatgatgctttgacttccggatgtttgtctattgttgtttttacatttatttccatcggttacatttatcacgtcatcaagccacatactgttttcgcgcctgggaaagaacctgataaattcactataccgcaatatatagcttattttaaagggaaagataaagatactgatcaaaagaagcaagttgtcagcgatgaattagttgcacttcaagagaaaataacgaagcaggaagaaatgaataaaaaaagagtcaaacatactaaacgctctcttgtatttctgatattcggctcttttatggctgtcgtttcttttttaatagcatttgctatttattgactaagtcgcttgtatccaaaccattggtttctatcggagtgtcactcgtaatatccggtaatggtgcggattcatctgaactacttccactaccatagtaaggatcacttgaactgtcttctgaagacaaatctacattgaagttggtatatatcatagtaatatggcgaatccctcactatagtgcgcccaccggtgttattagccggaaccagctgtctggttacactatggtaagggattcatgttttaataacgatattgggcaggtgctaaagtacaatctttttcagattcggcaaaaagtaagcggagttttttgctccgcttacaaatgaaaattagaagttggctacttcgtaatatttaaagaagtaatatagcgctaccttgtgccatttggtcagttccttgtctccggacaggagtgaggatacagtgcatttgtcaatgcctgtatagttgctcagatgtttgctttttaatcctaagcgttccatccgtcttttgatccagtcaatcgtgattccgtcgatatctttgcgatcgaagttcacggctgacacagtgagcttccagtcgtccgggatctctcccttaaacatgtcacggatacgttcagtcagttcctttttggagaggaatttgtcatttactaggtctttttgttcagcgcgaacaattaagcgaccttcattataggatacaacctcaatagagatgtgccccatgcgctgatactgccttgcgaactcgtcgatccgctttttactctcggcagggagaggtagtaattcaagattcttcataattcatcaatttacgttttgataatcgggtatttaataatgcaatatactttgtaatggaggggctttcgcccctccggatcacaatttgatgagtctcatttgcccaatgtcgaaaatagcgatctgcccattttcacgtccgaattgcttggcttcttcgagattagtgaaaatccggatggaatcgaagtagaacattccgttttcttcgttgaaccatccaccgactttcttttcgtgcattaaagcatggttaagaactcttttcagtccttcttctccaaaactgtcttgggtttcgagataggcgactgaaatgccttttgtgaccttttttaaggttgtgaggtcaaccgtgaatccatcgggattcgcttctgctatcgcttggatagccttgaacaattgttccataatataaaagaacttatgcggacgtcacccgcgtttcttatgactctacaaagatagataaaagtttgttagtaacaaacaaaattgaataaaaagtttgctagtaacaaacttttctatctattcctcaagttctcttctgtttcttccttgcgcctgatggattcatccatcgagtacagcgcatcgagcaacaaacctttccgaatctccggcttcttggtcatgtcagaatgtgacagggaatcaagtagtcgcagctgggcatcgaatatacgcccattattttttccttctcctgaaaatattcgtggataggctgcgctcatgcaggagaggcttccaagaatgtaccagtacatgatcatcttcctgtcgtcaggaagacgtttcagtatagctgcatcattgtccagacgattgatatcaaattcttttccacgatgccacaggcaggctaggagatggttgatcttttgaggatccagctgcatcgcatccaaataggtttgcatatacatgaattgctcaaaggtgatatcgaacagctgatcttccggcccgatgaatttccggcaccggaagcggagtgtcgggtaaggattgactgtcagttccggattaatgagatacagcctctgtgaagtgatacggttttcttcctcacgcatcaggaagtgaaattgatcagcgagcaggctgatctcttcgggatgaaggaggtaccgacggctgcggatccggaagcggactgtttcactttcctgcccaattttgatacggacatattctttgaaaattttcttgtgccggcatacgtgagctttcaggcaatagagcatcatgtagatcttaacttgttctaccggtatattcgatttagtgagtttaaccaggtataggagctgcttcggggtgagctcgtcccagcttccaggaagtgtgtatgtatcgtcattgatttgtatcgtatgcatagtattatgatattgaagtgaatagcttctttttcttggagttaaagtcaatagcttgggatcttgtttcaatgcctagttcttctgcattttcggccagataagtgtgtattttcccggcatagtaggttgcctgactagcaaagaaattaccgtttgcgtccggatcctgataaatcgggcggatggcaggtgaatattctattgctttgctggcgacacgttgctcggttgtcttttgtgaggtatagagctctgccgtcttatttgcaagaaaacgaatgatatgatcaatgagaacctgctgcttgggtatcggtttatctttagagtatgcttcccttaaatccgcatatacattgtccggtatcatttcacgaatatttcgttcctgaagctgacggattgtggggtacatgatacgataagacagggtggagtaatcgatgtctaccatgccaagatcctgaaaatcgtgtgcattccggataaagcagaaaggggaaatatggtctgttacgtattccggaaaatcttccttattttcttccagataggttataagccggtcaagagcttgcattccccggaagcacaggttctcctttgccgccgctatttttgaatcactggccggggaacgttgtccttgtacattactgaccgtgatgccggtatccccgaacatgactcctagttcattcgtcgcaagcattaaggtcagcggtccaagcgcacgcaataatttgctatatatctcagatccttggtctgtcagagcttgtttaatgacggattgccctacatagggtttaacatagatatcaagagcatcctcaatatacggttcaatagattcataaggcaatgacgaattgatcttgactaccttctttaaggtctcaatatcgggaattaatgcgttcatttttcttcagtttctggagttagacctgtgttttttgtagctcccgttccctgatcaagggtggtgagctggcagttggttacagagaaatagatgtccgaaggccattgattgactgccttggcaaagtacagaggttcaagggttgcgtcctggtacatcttcatgagggcttgctcgatggtgaacagttcgcgtgcttcagttccattaatgcttttgcctttaccgggtgcggatccgatgatggaaggatgtactcccattccataacacatcatgttgcttacttcctcgctatcctcaatatattcgccacctttgaagaacgattcaagaggagtaatgatgatatctttatcctcgaagccttttactctgtcatacctgaaatgtgaaacaaagccttttccggcattttcctcgccggcaaggaaatcgttcatgtcatcaagaaacttttgcctgcgggcagttttttcatcatctttgacgaccttttcgtctgcaaatagcttctcccaaaatgtatccttgatatatacgatatacctgagagccatctgatttttaatcagagatttcttgaagatgggaatagcacaggagaagtcataccatcctgaagcaaatacgctccaccagtacgggcgactataataaaagcgtcctggcgtcgaaatacgcagattgtgaatgaatctgcgatcttttccgatgacgaggtttccttcatcatcaggagcaagtcccatcctcttcttaagatccaacaaaggagtctggcgatcgagcaggggagtggcgacaagatcttcaggggtacctttcttccattccgctgaatatccatgccattcacttttaccggtcttctcgtcaatctcgctaatacgtgagcaggttgcctcttttgctttgatctgtacgagtttgggcgatttcggatcattgctgagtatgtactctaaataagcatcgtagaagatgacaagatcattagcgagttcgacacggatgaagttgaagttattgttctcaaggaactcaaagatttcgggttcttcttccggaagcacttcctctttgatgattttgcgggtttttccgtcgcgtttcttcctgtagacgaggatgctgtccccaaacacgactttattcttaaattcaacattactgccaatggtaacattggtgccgattttacgcataatgtcgtacatcatgtcgttattccttccgcgtgggatgaacttgatcggatccttttttcccttagggacgacttcaacggctgatgcctccttgtcagtcacaatgtcgctgttatcgctgaattggataactttctcacctcctttcaggactgcataggtttcgtaccctttcataactaggttaggttgttgctttgattccatattaaaaatatactttgagatgattaaactgggtgataaggcagcgtcggatcttgcgtggtgtggcttcaccggcttgcagtacattgattgtactaccgctgctatgaaatgaagtgagtacagcacgttcataagtgattagttccccggtactcttcttgcagaactggatggaaaactctataggctttccatccgcatatcgttccatcagcttccatattttactttgatggatccttttgcttgaatcttgcatggatgattaatgttaagatgataagaataatagggattccgatgatcaggccatactggatcccgttgtctattccggcagctacagaactgccggcatctttgtgggaggctgactgtttgctttgctgaagcgtgagatcattcttcgtttcttgactctcagatacgtgtatagtgtcatcttcctgtagcaaggtcttgactgtcttttcgttcccttcaatctcgatattcgatatcggggataagccggtctccggatctgccggcttggatgtgtcgaagttaactttgactttccagcctttgcccgcttcttcttgattaagtttgaatcgggagcaggcatcttcagttctgatgcgtagagctgagtctgagatagaaagacgggtttgctcttgagtgctactatcgttttgataagtagcacggcaaccacaaaaagaacaagcgcatgcaaggctggcagtacaaataagaatgtgtgcatagtgtttcattgttttcgattgttacacgataggtttatacatttgaatcgtttgagatcagctatttctttttcgttatccgctatctttttatcctgcgattgctgattgctttccagcttttcaatgcggattgtccatctcgtttcgctttccactttatcttttttcattgcttccttatcagctcgcaggtctgctatgagttcctgatatacgtcctgtacagagcttagggctttagcttctgcctgctttttagtgtatttgagggtgacgaatcctgtgatggttgataggaagctaccaccaagtatgaatgcgagtaattgttgtttaaggatagggtccatgtcttgtttttcagcaaaggtatcgggtatgcagtaggtcgtaaaggacatggcagaggcccaaaaacgataagatgaaatttgtttacaagcaacgaagcccagcatataaggggtgaaaaaaaactttagatctaaactttttctcagggcggtgcgtggtcggctgggagaaaaaagagaaaatattccctctttttcctccccttttattggttatcagctctttgtctttttttctatgagaattgactgagataataaaaagcacaggtagccatatacctgtgctttttattgatggaactaatgtttattctgataatagaatattggttagtttttgaagatttgttgctgcatgttatttttcatccttttagactttgaattggctaaatattaatatacagatactaagttcaatatggcttatatgcgacctcatttagcccgacgatgacgacagttcatgagcgacttttgatcttattcctaaaatcgaacgtgattattttgccaatagtttgccttctttgggacgatgctatcttctttttgtagttgctaagcatctcaataacggtatcaatatgattctctctgatagatccgatagtcgtggttacggttccggcataactgccatctggtttgagaatcattgcttcgccttctaagtggatgtaacctgttttatcattaataacgtgacattgagatggtatgatcttttctatgtattttatcatggtttacctcctttctcattgaatgtaatattgattatgccaccattggtatggattacaatgcccctgtgtgatttgttcactcggagttgttcattaccttctgctacttctaggcagatgttggagagagctttctgaagcttttctacggatatgtagcgtccgctggcgctttggtttttctttttcattttggaagacaatttaaaatgaaacaatatgctaattaattaaaagagagggaataaaaaaagttccgctccccgttgtcttccacctgattcaggcagtgggcgcattaacgctccacacgggacggaactatatcttatactatggacataaaaaatgcccgcagcaattatggcgagcctactcgcctgaaccaaatggaagacactgcaaagatggtgattctttttgaatagacaaaataaatgtggagtttttagtctgaaaataagctttaaaaatggtgtcactatgctattggtatacttactctatcttatgaatatagtgacactatatgactggtatagcgtcactgtatttattacgctttttattgtgtaatgtaggatataaaaaaggcttcctacttgtggaagccttctaacttatcaaagtaatagcaaagctattgatgaagtttttatcttactctattaaaagtattatatacttaatgtaggctcaaaatcttctgctgttaaatatttgaatgattgcggagctacaaaagaggaaaataaatcaaaaggattaattgggttttcatagagcttaggagatgaaatcttcaatgcatatccttttttgcgtccttcaaaatattgatcgaagaatttttttgtaataccagagtcattttgggtttgttcccataattctttcggttcttgctctatgattttttcaacagtaaactctcccacaatcattccttctggctttgtggaatatactacaactttatctacattctttgtaaatatagtttttctatattcaaattttttgttacctgcaaatatttcgcgaacaaactcgggcttaatcgataataatactttcatttattttacctcttgatattatattgttaaactgctcatctgttaattggaagaacccccaatagtcagcacttaatccgacttgctcaatcagttcatttctggtaattcttctatcaaatgcagcattataagtcattttaataacaaccatattatatgtagtataccactcctttaacttatcttcgtcaaagatactatataagttagcatattgaagaaattcctcaagagtagcgaagtcttttgcctttcttacttcttcaacaacgcatattgaagaagctacactcctgtattttgctggacctgcgccatcagatgtgcggtatattactaatatatctccttttttaagtttatccagtccattcatactggataaatatattttgtggatactatttgtatgtgcaacatccctaacaagaaactctttatttctttcttcggtatttaatatagagtcagggaataggggagtatgaaattcaggcttcacagctaatatgaatttttgtgtatcctttgtgtgaataaaggggtagtctaataacatatctcctgtaaaatctgtcatagatttaataaaaacaagctcgggagtatccccttctccttttgttccatattcagtaaaaccatatcttcgtaaaattttgattaatccttgatgcttttcgaagatagtcacatatatttcggtaactcccatatatagagctgctgcaacaatcttttttatgaaatgctcgcctaactttgtattatgtgcatctatcttgaatgttcctacttttaatctactcgcagcaggcattggaggatttatatcatttaattcctctgtttcatgcttcatatataggaagccttgaagttttccatcttgatctttttggacaaaagctttggtatcacttttagtctttttggtgtaccattcagtgaattcaggataatcttctttaagcgaatcaaaaaaggggtcggataagtctatatcaccaaatttatgttgtttcataataggatctccttacataactcttttagtaataataggcccatgattttcttattgtagtattcagctttgtgaataacattaaaaccaaaagagtcgttaataatatttagggcgcaacaaaggttggaataatatttgggaaaagcaaaagaaagtaataataaaacacaccttttttatttattattcaggaagaatacgccactagagtttgatccaggtgccgtgaaatagaagttcatgcctaaccacagcgtgtcaaatgcatcagttatgtgcgtcttatattcatccggattatcaggagtgtcatcgctcccttcaggcgttttatccttttcaaatccattctttccttgcttgatgccagtctgttccattgcgatcttcagaaattcattttgatgcaagtttatttggatccacagaaattgcggatctcctttcagagtcaagtctatattcagatgcttccactcatgtttcggggcttgaccgacatagaccatcgtcacgttgtatccattctctttgaatacccgttcaatgatgtcggcataagtttctgtagtggatcctgattcccaggtgaacgtatgatcatagtagactactatatcgtgattaagtttcggacggtagtagtcggctatcatcttgacaagatcttgtagcttccctggtgttttgacataaaatgacttgagaatgcgcatcgtgtgttcattcagttggcctacgacagcagtggagatggatgcatttgagtcgaatgccaggtgcagttcctgatcgaagtcaagatctccgtctcccaaacagccgcaggaggtcagttttccccagttgcacccaagattccggaggcgtccattgtctttcgggatatagaagtgaatattatcatccaacgcagaatagaagccgtttggtacacggaacaggcgttcgttcatgaaagcggtacgccaaattagcggtggtgagttacgatacatctgccagatgaaatcttctcccagcacttcaaggttgtcgaatacgtcgtattcaccatagaaaacggtatattctttagttttccccggctgcggtttgattggaggctgatatttcctcgctagatccaggtcaaattgatattctttgatctgacgcatcacatgatccgtgagtggcttgcgtttgtactcctgcagtttgagatataagtttctgatcaggttgatgtgaggtggggacatttcatccatcttgtccaggatccattttcccattgatgcggtcggcatatctgtggaatagcttacgctgtgatggtgcgggcattcaccgaagtattgccggttgcctcggttggcaggatccacctcacttttaatcttctcatagttgagaaacttagcttcagggcctatcacccaatccagcgacatggagttggcagacattccctggttgaatgacaggatcaccatgaccgtaccattccaaaagtggaatgcattgctccagccttcacccaggacaggacggacaggtttggcgaatcccatgcttgccggtgctttatgaccaacgacatagtgaatgccttgaatgtatccccattcagccaaagccttgcagattgccgggagagtatttccccatgccttagcgtatgacggagagatgagaccacccaaagatcccggcatttcccatacattccggaggataattcgggcatcaataccttcggacttcccggtaccacgtgatgcgactatatactcgtcatgtgcgttgatggccatcgcttggcgctgcatcttattgaagaatttgtcaacgacttcatattgctttctgcggcgttcacgggcagataagataggagagaggtgggtactcattcttcttcctcctcttcgatgggacgaatgtccaccgcttttttactcaacatacctttgaatctgcttcgcatttctgatctggttccttcaaggtcttcaataggttccagaccttccagaagggtaacatcatctgaaggctcaaatgatggaggtatgagctgggagtagtcgaatttctcatcttctttgtccgagcgagtgtatttgcctatcttgtccaacgctgcagctgctcccttggcatcttctttgtctattgccatattgaaggcttttttcccgccttcgacaatcatataccgataccaggcttttgcggccagttgaatgttgccaactaatctgttgatcatgccgatgtcccggtatgcctgtgactgtgatacggcatctgtgttacctccgcatccattcatcaggaagttgacaagttcggtgtcttggatcagaggatcttccatttttttgctgacacatagcatcattcgtttttttatttccatttcacgttgggacaggatgcttgatgcttcctctctgtctttgaacaaggcacgttctatccggtcatatgtggaatctttcttaggcataactatagtggtttgttgtattcaaacgaaagcgaggacaacactagatgtatcgccctcgcttgtgcatgaactgttcatagatccaggggcaatgcctctgatgttattccttacttgcgctctgttgcgtcgcaatttccttttccagtgctgccagttcttcttggtagccggcaacacgatctaaagcattttgcataacagtctttttaccttgagattcggcgcggttagcagcagattggctgttagtaatgttttgtttcagacgtttaatctgacgggcgatttcaataccgcgtactacaccattctcactgtataccggtcgtttctctttaagactcagttcaccttttccttctgcccaggcatcgatttgtttccaaagccggcggcgttcgtcatcgagcttgcagagctcttcggctataggctgccgttcttctgccgggatctccgaattagctacatcgttatgcaggcttgcatatagaggtgcgatttccttgatacgggcataagccttgcgaatagacgggctgagtgattcttctgtgatgattttgacgcctggtgtgttcagagcgttcacttcgttctgtaaggcagatagctctgacatcttctcgtcaaactgttcctgaagggaaacaagttcatcagcgtgactttcactgtcgtcctccaaactatcaattcgtgatcgaaggttattgaccaactcctccaaggaggcgatattcgcttgcttggattcgatcgttttttttcgatcattctcgctcatggtctttactacaacaatttcttccattgcggcaggatataaggaaggggagaatttaatctccttgtcgagtttggacaagcaattaacgagttgggtgaaatgcggatcaaagatgtggggatcttccggagctgctgccaggtaagcagcaaatttctttttcatagcttcctttgcgagagcattgaaaagaaccaggccgtcagcatatttgcgctgacggtctcctaaccattggctgagttgttcttgtctgatcatgattctggcgcgggagctggtttaaatccgcctgtcacttccatatctatgggagtttcaaggaagatcgcagagtaattggagtcggcggtagccgtataggtggtaccgcgacggtcacctcttgctttacctccattgaaggaaggagcggtagaagcgtataatcccggttgtcccatgatcatttgtttaccgtccgaatcctcaaagatgtaatagcctgctgtgttttttaccaatgcattgaacgcatgcatttcaggggtattaccagggaagaagaaacttagcgtctgtttatagctgatcccgtcagcttctccctgctgctccgctttatattcgactgttgcatctgtactatatagataaataggttgcttatacgtcccttctgcaggaaaagcaaatgtaccggctgccgtcactaacgcctcgttgtctgctgctttgccgggagccggaacagtgggtactgtattgggtgcatcaaatgggacgaacagtaaccgtcctttatatccacccatattattttgaccgacattccatttcagcggtgcgaaggccggaccagctgccaacatggtcaatgtatttccatcaagatgacatgtctgagggtgcagctccgggattgcaataaccaaagccacaaataacaaacagagaattaggtaagtatattttttcattagtgtaattgttaagagtgaataggatagagcgaccaaaaatggccgctcatttttttatctcagtttaggtataagcaccagttgcggttgttacctcgccttccactacagtcacttcctgatcggcaggtttagtcttaccgtctacggcagtaaactcaatagtgtacttaccgggtgtcagaccaatgatgcattgaccattgctacgttcagcaactttgcctttgatggcccaagcggcattctccgttcctgtgatatcaacttgtacgcctccggtcttgcaatagtctcctgcgaggtcaagagattcatttttttgctcattacagcggtatactttttcatgccagtcgcggatacgggtgtcataaccggtttgcagccagaattgccattcgttgggatcttcgtagatatcacggatctgacagaacttggttgcggcttgggtattgaaggcaacatccatattccctttcttctgaagaaccaggcgtgatccctgtcccaatgcttcgtgagagaggatttcaagcgcagggcacattgcgtcttcacgcaaaagttcaatcatgcgttgcatggaaggatattcctgcatactcagtttgttgcggagagcagagcgtgcagctatcaagaccgtttcggcacaaagtaactgtggaattcccgacttggaggaacgcaggtaagtgttggcaccaccaatccattcaaccaaattttcataagcggcggagtctgtatcctttgtaggcaaagtaaaaagacctgatggggcaaagttgccgcgagcagcattgacatcacctgttgtaatcagcatgtcggctttggtgaacagaccatcaaatgcacctgacggtgaagttgagtcttcatcacgttctgcatgaaacaatgtatatactacatcttcaacatgagattttaccaatgtgaaggcaacacgtgtttcaagaggatgtttcttgttgatgttgctgactggctgacctcctacgatcaacagttcaccgtcatcgtatttttgagagttttcctttgtgatacatacaacatccttcggttcgataacggaaggttcatagccgagcagcttatcaaccaggcggaaatttttcccaatcttgtaagactgagttccaccggcacgccggcgttcattgatcaaggcatgtttgccttgcagatccatcacgttcaatcccaattttgcggcaacttcctgcagggtagcaaatggaagagcgcgaagcgccttatcatatgtgattaaggtttggttcagtttcgatacgtcaattaatttttgagacatattctttaatagttaaggtaggttagtaaattaaaggagtccgtcagccttcaggcgttctgtgattccctgataattgccggcattttcctcgcagtaggcagccagttcctcttttcctccgtttacggcaggttcaccctttggggcaggaactggttcacccggtgccggagctttctttagattggctacttgttctttgagttgagtgatctctgaatccttgccgcttgcctcggttttcagattagcgatctcttgatctttttcacttactgttgtcttgagagtcgctatttcagtagtcgcatcagataatttctgatcgatctcctgtttagcttgtacgagagaactgttatccgatttcagacgggtgaattcattatgcagggagtcgaggttctctgctgataattcggtcgttactgccttatcttgactgatattcagaaaagataaaaaagctgaccatgattcttttagagtcattttgtttttgaatgaagttgttgataatgctggcacggaattcgtgtccatacccgctgccagaagaacggatgtggaacgatcatagaggcgaacggcattggaatttgccggtatgtccacgatggatgcttccatcagctctgactctgtaactgtttcgcgagtctgaccaggtaccagaaggtctttgttggctgatgtagcaatgatgcggataccgacacttgcggcgttgtaagtccctgcttcgtattttgcggcaatgtctttagatagttgatcaaccttgtcgaaaacaggaatggcagaaagtacatcgccttcaagctgtatatcttcccaatgcccgatagctttagtttctccccaaatgggagatccttcatcacgaaaatgcatatacagcatcaccgggttcttcttgaatgcttcgaggagcattccagaggtaaggacccggtaaccgtaacgattaagcgatgaatcggaaagaatgatacgtttttggctcattgcactgattttggtgcaatgatacgcctattagtgagggtgcagaaggacggttaaatttcgatataggagagcatcggatgtaatgaggtcccggcaagtttcagctcatatccggtgaagtcggttacctttttccctataatcaggtttaagtttccgaggagtgggtattcatttgtgccatagatatacttgtgtccctgtgtgtcctggcagcgtaggacacagcctgtctgaactttattgcgcagctcgtttgctgtattctcctctaatgcggatcgaggaaactggatggtcactgaatgcttatatgtgattcctgcgtcttttgtatcatcagaagcgacagttggagcttcaatgattcctcgcgttggaagcggataccagtcgtgtccttccttgctcctgatgcatgcctggttctgatgtactgcaaacaggactatttcgtctgtatttagtatttcggcaaataatatgcctcccatattattgatatcactcataacttgttgattttcaattagtacgcatttttagaacattttttgatcaaaaaagggacaattaactacacttgctcggtcatgtttttgtgcggtgatagcctctttttttctcttttcgtcgaagattagccctccagcgataataattcttcttgaatgcatcttcgctgatggaatcaatcccatagcaggtcatgaagttgtgtatcccgtcgatataggtgattccgtaagtgtgcttttgctcatccaggtaatcatgtacctctgcccatagcattctctcgatcttgcgaatgagaattatctgtgaacgtattcccaggtaattgtaagttttaggatccttcccggtagtacgttcaggaaggatgatggtgagattaccatgatccttaaagatgttagctggacgacgttctaacagatcgtagataaaatggtagatatccgttttatccgggaagcgaatcggagagtcctgcaaattgcagaactttccgatcagatactccttaagatgctgtggaacttcaatcttagtagtaatcatataaagcatagtggtttaggtgtggagctaatgtacaaaatataactgagtaatccttgcctttatcaataaaaaaacgaggtattgtacatataacccttgctgataccgtactatttttttgtgcaatcgtgctaaatgagctatgctttctgtttatgtgttgtttatcagatagttaatggcgtacgaaatagtgtactttttagcacaaaatcttcgtactccgtacaaaatgcatttttgtgcgtttttgtacgaatcgtacgtttttgtacgaaaatcgtgcggtgtttaaatatctgatttataatgtaataaatgccgaaaaaagggtgtctgcacgaaagcacaaaattttcccttatttttaggtagggtatttttaagaaagaaaaataaaaaaaatatatatgtccccctgtctgcgcttggcgtctctccccctgcacatttgttcaaaacgttcttgatgaatgaaggggaggcgaggggaacggaaaaagaaagcccggtaatgcagaagcatcaccgggcaataaatgattcgacttatgttagcgcaaatcatcaggataaaacacttgcgatatcaattcgtactcacgcggtagtgacttgacgccgacgactacgcagatgccccttgcggcaagctcgtagagacgctgtgtcgtgatgacagagccgcgaaagttgtagttactgcagagaatgaagtaggcagtaggcaggtcaaaggaatagatatccttgcggatgatttttttagcatccgaagggactttggcaaaacctagccgaacggccaggcgggaaatgaatagttcccgttcatcgctcgatggggctattactaccattattttattctctttttttattgtcataatgttgcgtatatcagtgaaaattagtatctttacagagtaataaattgggataatctactcatcttcgattcgagtagaagtgtggtcggacatgtgccggcactaatttaggcacatgccgaatgctgctataatcgtcagaaaactctaaaaagtcatccaagacatctttccttgttgtttcttcaataatatacatacaagctattttaatgaatagatcacgtgatgcaggcttacaatggtcagctataagaatactcttgccttcaggtattgtagcaagaatgttattgacggcgtgatagaaacgcatgaagcgttccggatcctgccggtatagaggaagaacttcgtctaatatttcttgataggttcccatgcttaagtgcagaatagtgatagtgcaattaatattgataatttatattccctgctgtatagctccaaataccggtgtgaaacctgaattttagcgtctcaatgattccttttttttgtgggatccagttgtgtaaagcctcgatgtctcctacttccggttctggcggaaatacatataggtggagtccgatgacgaaccatcttattctattcatgttccaggtatttttttagttcactccgttttatgaagaacgcacatgccagatactctccgggcatgcctgttcggatttggaacttggcgtcatcgctcatctccttttctgtaccgaatccgactatacttccacgctgatcttctgtaacattgactaatgtcgtggtcattctcagaccttgattattatccattgccatttgctggatggccgccaggatattagcgcctcgatctttactcatttgtataattattataaattgatttctttgataaaattctctatatacttacaaggtttaatcccttgtggcatatctttcttgttacgtatattgaaatatcggtgaaggcattcagtgtatggagattcttccttatgacataccataaggccatctttctcttcaaagagcggacatgatattgcgaatgcatgtattgcatctttcttaacttcgtctaccaattccagtatggtcaatttatcatgaggaccgaaattgtcttcaataaattcatctatttcattcctgttcatactttttcttgttaagaacatgctgctactataagaatgagaataagtattattgctaacacatcacctaaggtaaatccgcctttagattccatcatgcgatatatttcttgaggtgtttctttatagtacccatttgggatgctccctttaaaatagaccttgcttccatcatcgtcatcatctacacggtcaatatctttaatccagtagacttttttttcataagagtcttgctccgttaatagtataaatcgtttcatattcctttattagttatacgtcaaacactactttctaaacttttcactgtaggcataatcatccttcaaatgaagttcttcccttattttttggagtgcatccattcccttctttatttcttcttttttagggcgatatttgtctgcaacattgttgaatcctcgctgttcaagttcttttatcttgctatctaacaatacatcagcatagcaaacaacgtgcattatagccgttatgtcctcatattttatattcatatctttataaattttggtttctattcttcagtgaaggtattagtagtatttatcacgccagcggaatcaacagttttgccatcacggatgaaaattttatcatacattaaagcttcataatttgactgggtggtccaaaatgcgcacacccgtccatcggcatacaatttacatttcactaaatcagtccctttaacaggaccaataacatctatttgtagagttctttttcccatacttcgtttttattttgttactagtcaaattttgatggcatatcttcggcaaagacgaacgcttcagcatcattattccatctaatttctttgtttccttcgaaatcacggaagaaatgatcgtgttcatcctgtaaggcgcatagacctatttgagtcgttccgtcagatacaaagtactcattattgtaagccttatatgcttccaaatccgatatgacgggagagagaatcttctttgtatcttcgttttcgtagacttccatatacaagaactctccgccttcgtacatatcctgagctgcaacgtgttttccctcaactaaccgatttaatgcttctaacgtcagttcaggtttctcgtaaaattctactgtaaaaagtttttttgtttccattatttccgttttttagatggtatataaattggggatgtcttccctttattggttttatttatgccgttcattttgtcaaccgtcttttggctgaagatggcagaaccagcaagacctttaatgttttttcccatattagctcctttctatcttgtgtttaatcaatcttcttcgtaatattcaagtcctttacactcgtcgttctcaggaggagttctacctatatcgcaaaattcctcttccgtttcttcgttcattaaacaatgaacacaatagtcgcaatcgtaatccatagctcattattattctgtaaatactaaaaagtcagttgggtctgcatacatgctaacgagtctttcatcccaatgaatacctgccactatccatttatatggaatatccacgtatgaagctttgcttttgtatgtagcattccaatgcacacctatttccctggactcatattctacaatctcaaaatcgacaatctcgcattttaaacgtttcttgatttcctcttttaacttatcagcatgagataatacctcatttagtaatatttttcccatattcatcgctatcttttaaaagtctatttgtttctgttcatcctcaaagctggtatcagctgaataactgtcaccagtgtaagttccagtgccaactgtgaaatattctattcctccagccttgtcgtcaataataggtcgtccgtctttatccatctgaaatggattcccggtcttgctatcgtatttatgaggattaaaaatatatcctttccattcacagtacattataaatttctttttgaaagccgtcggggagatgaacttcctttgtgccggatcgtatgtacagaaagcatcatataggtccttgcggataagacgtcgattcaaatgatcctcatttgaaaagtattcatctgcccaagatataagagtttctcccatttcttggcggagtttccgttgttcgagtctctcgcctggagcttgtatgactccaaactgcagatagagctggatgcagtttgccaataagttccaagtaaggttccattgatcaaaatcccattccgagaaaaatagggtaccgaaatcatcaacaggtttgtggctatcattataaaagtcagagaaggcaagtagccattgtcggtcattgaagctggatccggatccctttagtgcgtgatttgttgcaatatagattttggcggatcttgagaaggggatagtaaacctgccttcacctttatggtttacactccagtctccggtgatgttcggaaaaagaaactcaaagttaaaattcaatagcacatcatctatgaaaactatctttgtgttttcttgtacgtcattccagataaactgatcattgaatatatcctgccgtttaccaggaatgtaaactgtaggagtaacatgtctcattagttcgccaagcagtgatttccctgaacgtccatttgattcgccaacttcggattgttttccgtccatgccgacaacagctctagcgacattgttgtctttggcttccattgccataaaaccgatggcgcatagtttactcaataaatgaatcttgttttcaatgatttcatcaggttccatttcttctggagatttgcgccatgtaaaattagaggcgttgataagaaattggagaaaatgacatttactaccatcctctgaaagttcgtatgagtattgcccatttgagtcaacactgaaagtgatcaagggggcattgagatacttggcttttatttgcttccgttgttcttcccaaatatgatgtgttatgttttcgtatcccatctccgaaacctgatccttcgtgatataccagcagttactatcaaaatagaaaaactggctttcccggttaggttttataaagtttggttctatgaagtttaatagtgataatttgtccggacctacatattgagaaacgcctttaatcaacatttcattaacttcctttttacaataatgcttagcaaattggaataaatagtcgcgtgcatctgatgcctcgatcattctaaccaccggaggatccaattggataaaacggtaggacttatccagcattcggaggcgtccaaacccccgattttgtaggaagttatgtgagttgacatagcagaactggtattcgatgcgagattgtccggatcgattttctttttcaacttcttcccaaaatttttcgtcatcatcaaaaggctgtgcgaggacaaatttaccggaatcgtcaaatttccaacgatatcttccaaatacgaattccggaagattctttagtatgtctttatggcgttcggcgaatgcttcaggtgcatgcaagcaccaaagttcttgcagcttatgatctgtccaagttgttatcttgaacatttctatgtatttccctaggcctttcttttcgttacaagcataatctatgtcctgagctaactcgtcctcatgctctcttagactatttgctaacagatcgtctactcctttgtctccagcaggattcttttggatatgtccaatgaatatctcaacataaatattccggttttttaaggtacgcatatattccttaaagttacgagctgcgaagaagaaacaactaggacgcttttcgactcgatcattaagacggacgtttgtgcttatgtcgtcccaatctgaatcgaagataaaagctacttcctttacgccacaagttgtgatgatacggactagatcttccggaagagcgccatttagtccgagattctgtataccactaactgcaatagacggaatcccgtgcttacaagctttttctgcttttttctcgccttcctgaatataaagcctgtgtatctgctgtttctctttatataaacgtcgcagtttttctggaatatagattggggtgccgcttcctgatggtgacttgtacttataaggttttccctctttatcaagatgggcatccgggaattgccatcgcacacggaaatattcttttcgttctcctgtttcttttttccggtgatcttttcgcgcatatgttaccggcattccttcaagatcatagtattcaatgatcacgtcgtcgcctttaggatcgatgacgccattttcattgatagtgcctggacgaaaggtacgtaattcaaagacagaactagtatcgccggttttatatacttttgcagtaacatcctcaaatgtcagacctgattcagaaagcattttagcacaaaaactatctgtatcattccctttagcttttttgctcccttttttcatcttaataaccggcttctttttatcttccggccgttgatcaagtaagatgctaaatttgtgtgctaagtattcgagagcatcagggaattcttttttctcaactctcattaaatagtcaagcgcacctgctccagctatctgatggcaggaaaaacagctataaatatctttagcaggattgatactaaacttcttcgaagccttgcagacgggacagtcacaaacgtaactagtaccggacttgcgaagattctgaaagtcttgtactacgtctaccaaatggttagcagaggcatctttgatgcgctttatgtcatcatcagtaaaatgcatagttatggtttattattttgtataggagaaacaagttctgttagttgtgagtgaagctgtttctcaaggacttcaataggatgggataaaagttgcttgtccgcttgctgaataataagttgaaggcgctttgcgtcttcaggatgaatatcgttaatcgtgaggtaaccacgatggtcattgtctacgtacatagtattatccttttttacgccctcctacggctttgcggtgataatctaatttataccgctgccgtagtttttctgcatgttcttgggtcgcatctttaggatctacgagaacttgcgtccgggtgtctattcttaacaatattttgtttgattcttgctgagcagattgctgacatagagctgcaacttcttccggatcatcattctcgaaaagattaattttctctcttttcttcggattggtggatgggctgggagagtgtacaactttcatagcttgctctatcctttcctaaacaaatcttctataattcccttcaaataagctggcatatctcttggcactgcttgttcgttttcttggcatttgtaacactcgcaggctgtaagaaatatttcgcgagctactgggtggttcttcatgactgatacaactgccggtatgatatcaagagtagttccttgtattagtaatggagaagccataacatttcctttacccttatgtaaaatacaaattccgctcattccgcttgttgtgataatctctgaaatttgaaccattgctgaagtaattttttttgtttcttcttctaaattttccataatgtttattcttaaaattaatactagaaatcgtgggtattcggggatcgatccccgtatcatcggaggaatgctgaaaaactccgttgtgctaccttacaccactacccgtatgccgggaatttcacccggcaatctttgtgtaacaaaccttaaccagggactggataccctacgtgtctccttaacacggtgttttaatgattaataattggaatgattaaacttctattctcttgagtagaatataatgtataaataaaatcccggacttgcaccggccgcattccttatgcgtatttagttaaatgatatatggttgattaatagaagtttcctgtcttctggtacggtattctgtacgattcctgcgagggcgacggactgtacatgttgagtcagtaaatattgcaatttcacctcctaggaatacgatgagtagtgttgatgcgacaatcttccttgcgaaaggagataggtcaaagctgatatcatgatgtgtacagaaccaccaggccgaaatctcattgatcttgttcaatcccaatttctctttgattctgcggagtgtattatcgacagtccgaacactgatctgaagcaatgaggccgtttctttataagatcctccccaggcaacgcattcagcaatttcattttctcgttttgctagtgtgatgtttcgattcatagttacatttcttcaattgtccagcaatctgttatgccgtatttttggaatacattcgtaattgctgtaaatagggtaacagaaatatctataatccctgaatttagcttctttgagaagtatgatcttgaagggttattcagtactactttcaagtcatttttgagcttatctttttcctctaatgagacttgcagatatccttttttaaaggaatagcgttttttcgctattgcacatgttctagttttgttgtacatttgttgcattgattttgaaactatgttgcaaatatatagaacatttctatataagcaatgaaaaaatgaagaaaatttctcttttgatggagaaatgttctaaaatggtatgatatggagaatatgtcaatatctaaagaagcattcatagatcgtcttgaagcttttatgaaaatggagaaattgaacgctaatagcttgactgttagtgctaaattatcaaatggacttgtgaataaagctttgaagaataggtcatcaatgaattctgatagtatagaacgtattctatgtgcttatccacgtctcagtgcagactggttgatgaccggtaaaggtactatgtatgtggaagaacttcctaaaatcacggattatatgtctaatacgcataataatgatagtttaatcttttttttgcgtgatagaaataaagagttggagtgtgaaaataggaagttggtctcggaaaatgcatcactgagaactaggctggagttacttgataattccgcaggtaaaacaggatgaagataattaaaggcgggaaattcccgaacaaaaaacaataaaaaatcaagtttggttcgaactaaaatgtttgtctccgaatagaacttaatcttgggtccggtgatttttgtagcccgttatagagctaaattcttggttcttagtactggaagtagtgcgccaggaacctcataaaaccctttcagatgatctctgagagggtttttcttttctcttaatccaaaatgttcccactttgttcccagcttttggttaataccatgatataaggatggtgttttgagaggaaggctgttttttattcttctatttcttttattctttcgatttgtttattcaagaagtaatcagtgtaaagagaatattctccagtttcgcaaaaagatattaatcctttcttgtagttcaagacattaaaatagcaagattcttaacttcgctatgataaagctcagaaagctttgataaagggctttcgatgatgaatgcagctttatttatttgttcttcattaaatatctgtttcatgtattccaattgtctcactattgtttttatccttgaccgacccttgacatcattagcggaatttgtcggaaatggcggtatttcatctaaattgaaatcctaaaagggacattggagatatttactggtttatttttttttcttctctccaataatcgtaatactgcatgggattccacctttcagcatttctgcgtggataatgaccggattggcatacataccgttctgacattctatgctaattttaccatttttgtcagtttgtatagtaggattccaataaagtgtacggcgacgatggttgacatttgcagtcggtattttgtctttgtagacaggagaatagaaagctaatgggcgagaatatccttggattattgtacgacgtgttccatgggcagccttcattgacttttgcgttaatctgctataattggagtcaaaatgcggagttatgtagaataaagcatattgtccgaatcttgaaaaatcgatattgacgtttacattattgttgattcctgatgatttctttctaaaaaggggttctgatttggccttttcagtatcgtctaacgatatttttttctttgcagcatctccataaagatagaaactgtcatcaaaggtacgtgggggattcattgctgtcatcatgtcttttacattttgtccttttgtcatatttgaaccgtgtattgaattaagcacttcattagtatacgaattgcttccttcgcatatcataatctgttttataccatctatctcattccacaatgtccaagcagttaaagtatcaagtacttgtttgccaacaatgagacagattgttttctctttatatcgtgagcttccgtcttgcacatcgtatgaaaagttaggattcactttactaagcaagtcgggtatagtattaattactattccctgatcgcgtaattcatcaaccaatcgcgttacatcatagtatgcgtctacgcttttctcgaatacttgagtagtgatgttcttattttttcttttttttgctatttccacttcgctcaataaataggtgttgttagttttgctaatagaatctacatatagcgagtctatacggttggaaagggtgatccatgagtttttgtccatccactgtggatgttcttcttcatagctgaaggcacgtggggtaggggcgaagttacggtcgagcataacagaagcatctttcttatgtttggatcccctacggcgtatctggaataccgcttctacttctccttcaaaactagtaaccggaagttgaaatttgccgttttcatctgtaaacgtatttcctgctacaaatgtattgtccactttagccatgacgcttacctccatatctttcatttctttttttaaaagagaagaacgaatctgcccttgtagtaacaactctttttcagctgactgttgaagtagcttttcatttttaccggaagtaagttgtgataagtcatattgacgccaaccgtgaaccatgagcaaaacatcaagttcttgtaatttgcgaagcgtaatatctgcaaaataataccccggtttatcaatatatccttttaaaccggatgttaataacatatctgtaaatatattattatcatattctgcataatccgaacgtatagcatctcttactgatatggataaagaaccttgtaaaggatttcctttttgatctgttacttgtatttcgcagcgaattggttcgaaaggccggtaaatatctttaattccatttaattgtattgaattcaatttattgggttgcacaaatgtaaatcgttcgcacagcatattcccggttttgtctagtagactgacttggtatatgcctccgggaagatcgcgcgttttaagtaagaaagtttgatttccacctgatctcattcgtagtatccaatacgaataggggcgaccttcatgacttatgaatgctacaatgtctgcatccggggtattctcattgctcaatacgttacctacaatagctccgcttgaattattcacgttcaatacatatccggcggaaagggcgtccggtagattgaatttatattctttttctttataagttactttagctactgctggtttttcttcgggtgtataagtgaatattcccattccgtcatgtagggtttttatttctgtcagcttttccccgtctttcgtataaatggcaccttcaaggataacattaccatcttctctactttcagctttaaatgccacacgagaagagatgcctttcacgagtgttcctccttcgggaaagaattggatagcaagtttatctgtcacatttttcggtcgctgtttcatggaaggattcagattataggtcgaaatcctccgttctggtctttctccttgtgcagactgatagatcgggaatgtacgtgagaagtaagaaggttcgctgaatgcgagcatccaacgggtgtaagctctgatttcataatagccggacatggtactttcattcaggattatctgtccatgtccttcaccgctattcaattcaatgatttggcgttgggtaatatgccctgtctggtcgagcatttctacataaaggggtttgctgatggtgcttggcatattgttctcagcatataccgtgtaggctttaaaccatatagtatctcctacataataactactattatcaaaatgcaagtataccttctcacgtgggtatgtgtcagcaaaagcaatggcattatcgaagaactgtttgaagatgatgtcgctgctagcgttttgtgaacggagaaacaaaatgctatgtagactgcaaaatagaattaaaagtattcgtttcattattgtgatatgtaaggttgttaatcatagctaaactcattgcaactaaacatgatataaatttctttgcttgtatattcttgatagataccgtgtcgcactgcagttttaaattcttccgaaacattgcctgcgtattcagctgttatgagatattctccagtcttcctaaattttggaacagtaacttcatatcttccgcctactaattggggaaaaactaaatatccatcaacaagcactcttacagaaaaagatgagccacacttaggatcattaattatgaattttagtgattccatattgttgaaatcctgtgaattataaccataagggttattataagttggctgattgtaatctttataataccatccagttgcaaggtttttattgtaccatttttctttatcattaatacttttatctgctttccctgggaaatctttatgcaacaatctatatctaagctgaactctagtaggcaaatgtgtagcatttaaatccataggatcttgaaatccattgactttcactattccataattataattccccgggcccccttcacctaaataacgccaaggaaatgcagtagtaccacttattagcctatgttgtacttgcatatattgataatccatccaattagcttctgtaataggaggataacaagtccaaataatggtcatataatatatgcaagtatcaggaccatgtccagaaggaaaatcacgacaggatacctgatattcatatagagcaggtagcgcaccttctctatctttccaccaatccatcccctcttcatattcttgtttagtgaagaatgcattagtagcagacgttgagttggatattgtgttgtctttaccaagcatagtactatctgttgctacatctgaacttattaaagcattgctttcgtttaagagagtttgttctattccttttatttcagtgacagcaatagtttgcaaatcattattacatgcagcaaatagtgcataaaataataatgcaagcaatgagccggaaaaataattaattgttttcataactactggattttaaataatgttactatttttcagactttaaggcgttgtgtaaaatatgtttttgttatttgcttggatctctttaaagtatttaaaattgttggtttattctctgacctttaatatagataaaaaaatgacgtaaaaaaaataatcctgtcttatttatatatgtttaatatcttcttgaagttttgtatcgataactctccttcaattgctcttattgtatccatatctattcctcatggcattactataatgtttaaaattgaccatatatatcctgccagcgtaaaaccggtgtaacggaagagttttctcgcagtgtgtacatagctttagttccaatctgtctactataacccggttcctgggcttccgcttcaccagatcacaggatatatacattctcttgtaacatatcttcgacaataagctatagatcgcttcctgtatttagcaaaatgagtgcaatccggccgggatgatgtttgatgtatgtcatggcctttcagttgtcgtttgatgagattttcaaacgggaacaaacggactgcaagaatgatagaaagtatttctttgatgaatgttggcatcattcccgtatatcctgtcaaagattcggatatactgaattacagaaaaggactgatagcgttttatgaaatggaagactacagcctatatactgattattttctggatagacagattgaacgaattaaggaaatagaataattctttgcttactcgtttcagcttttctaaaattatcccataaatactgtttatgctgttgaggtgtcaaaagtttgctagggaaaaataaggatttgctaatatggaggcaatatttagaattaaaatgcgtaaagattatgcaaccaaggataggaagcgaccaatctcttaatattttttatcaaaccctgacattggaatatcgtagtactgaaccttgtagttgttataataaggcgattgatgaaatttgcaggaggttagagctacatagaaaaagaggaattttgtcgatagttgctctcattacattcattaatggtattattaaagcctgctcttttacctttctgaaatatattttgtatttttgttatatattattggagatatgaaaattaaagataagataactcagagtcttgcaagtataactgttgaattacaggaaataagtcctgatttttatgttataggtgcatctgctatgattttatcaggtatagaggtcggagaaactgctgatatcgatattttgactaccgaaatgaattcatgcaaattgcaacacttgctaaaaacatatatggaaatatctccggaaacaaaagaggatgatttgtttcgttctaattttgccagattcaaacttcctttaatggatattgaggtcatgggggatcttcaaattaagaaaaacgatatttggcagtctgtttgtgtaaaagaatatgaggaaatattcattgggaatttaattatcaagataccaactatagaagagcaaaaaagaatcttatctctttttggcagagagaaagatttaaagaggattttaatactaaatcactatctcttatgaaactataactattatattcagccaaaatggcagagtgcaccgttaagatcggttgattgatgatatctaatttaaaacgaatgcgtatatgaatacagattttgtaaacttaacaaaggaaaacctcagtgatgagcatctatgctgcattattcgcagtaaaaagcctcatgcaggtattgacgcgaagcggcaatggctttccgacagactaaatgaaggtcatgtttttagaaagctaaatgcaaaagctacggtttttattgagtatgcacctcttgagacagcttgggttcccatcattggtgataactattattatctgtattgcttatgggtcttaggaagtcctaaggggaatgggtatggaggagctttgatggaatattgcctgacagacgccaaagaaaaaggcaaatccggtgtttgtatgcttggctcaaagaagcagaagaactggctttctgaccaatcgtttgcgaagaaattcggttttgaagttgttgatgcgactgataatggatatgaactgcttgcactttcttttgacgggacaatgccgaaatttgcgcaaaacgcgaaaaaaatgaaaattgaaagcgaagatctgactatttattatgatatgcaatgcccttatatttatcaaaagattgaaatggtaaaacagtattgtgatacaaataacgttcctgtatctttaattcaagtggatacactccaaaaagcgaaagacctgccttgtgttttcaataactggggcgttttttataaaggaaattttgaaacagtgaacttacttttagatgtcgaacatttaaagagaatacttaaaaaataaataagcagatgcagataatgatggattaatgagatagggttattctctgttttatttatcctgtctctttattttttttgtttctgaaacgataagcggatcaataaccaggcgattaagagacagatcccgatggcagtgaaaactcctttgcgataagaatcctccagctgaatgctgcattttacactgtcgatattggtatcgaccggatgtacccatacactggtcagaggtgtttcgtattcctttccgtttgccttgatggatgccagaggtagtttggtgtttcctggcttcttgaaacgtatgcggtagctgaatccctgctcgtagatatctgtcaatatgccgttttttactgtatgaccagctttgtgtggtgttgctccttcaactgtttctataagcgttccgaagtcgggtggagatacagaatcgaaatcggctgtgctgatgtattttaattcaagctcttgtcctgctttggctccattgcggggagtgtccagttccatatagaaacgttttgtttcttgggcaaaactttttagtcctataggcaaaccgataatgataaacaatataattcttattagttgttggataatgtatgcatgcatattccttatgtgagatataattataaatgatgaaaaaaatattgtttattttcggtttgcctatttctgcttatctatttttagccgatataaaattcagtcgggattagtttgaaatcaacaaattgattttctaccggggcggactttaatagaaaagggacgatgccatcggatggtaaagccttgcgtggcagtgctgtctgtttgtcgaatttataggtggcacaccatgcgttggcgtcaccacatacacttttgccgatacgaaaacagaattcgctggtatcatcacgtaacgtctgtattagtttgcggcaatcaccggggatttggtcggcatcttgcaatacatttatttcttctgctatttgttttagccattcggtgtcgtgaatgtgtttttgatcaagtgcaaaaacaaatacggcaggataatagtcgttattaccgggcatccatagggcggtattagcttgcactaccgcggcataaacaatgggagcctcggtgtattttcttttccaacgatctttgaatagccagggggcgctgcctgccgtagctttgaaaaaagaagtgctcatgtcacgtggtgtctgcaggtaaggggcgagtttgttcaggttagtcggattcttgaagttttcccgctcttctttttcgcggaggcgctctttttcttcttcctctgtagatttcgcgcgtttggcgcgtagttctgttacatcataaccttgtgattccatttgtgcgatgtcttcttcactcatgttcttttcccaatctttgccgggatttacaaataatgccataatctttgttttttaattggttatttattgcttcttgaaaatagtgtttgttttataagatatttgtttatatataaatataatattaaaatattgatatatagtatattaataatatatatgataatattagctatatatatggtttcaaaaatacattcttttatttaaaaacaaataataaatggaaggttttttatttgcaaatctattattcttcctgtttggtatcttcttggatttatatttatatctttgcagtcataaatatcggattttagttgaatatattcatgaatcgtatcaaaggcatactttatgcggcagtttcactcttccacttttggactggctccgtttttttcatcactttattgctgatcggtttttcagctttcgaagtactttcttatcgttgggggatagcttcggtagtgttaatcatattcggattattttccggctgtgactttcggttgaaaagaaaggatttggcagttgtgtttgctttgagcctgttgagggggtaagcatggttgtgtttcgtgaacatcgaatgaaaaggatataaaaaatgccgcatatagcggcatttgaattttgaggagagcctcttgtcggattcgaaccaacgaccccgagattacaaatcacgtgctctggccaactgagctaaagaggcgttttctgttttgcgggtgcaaaggtacgaatttattttaaaaatgcaaatacatcgtgtactttttttatatttgcagtctcactaatgattgcaagaagatgaaaaagaaaattatgaatgtatgtggtgtggctttattagccgttagtttactggcttgttcaggccagaagaaaggagcagaagctactgaaagtgcttccgacgcagtgaaagtgactgctgaagcgacgtcggcacaggctgatagtacaggatatattgtcagaataggggagatggcccctgattttacgattacattgacggatggcaaacaagtgactttgtcatctcttcgtgggaaggttgtcatgttgcagtttacagcaagttggtgcggagtatgccgtaaggaaatgccttttatagaaaaagacatttggctgaagcataaggataatgcagactttgcactgattggaatagaccgtgacgaaccgcttgaaaaagtgcttgccttcgcaaagtctaccggagtgacttacccgctgggactggatccgggagctgatatttttgcaaaatatgcattgcgtgatgccggaatcacacggaatgtgctgatagaccgggaaggaaagattgtaaaactgactcgtctgtataatgaagaagagtttgcttcactggttcagcagatcaatgaaatgctgaaataagtgcttattgccggtctctgaaccggatgcgggcacaatagatatagtgtcactatcacactgggatggtgacactatatcgttagtatggttacactattccgatgtgatactgtcactatcctgaatagggctttttctgattaaaataatacgctgtcaggcaaggctcagctttgcgagatagtcataatgttttccttctttgattaatttcgctttgaatccacattcggaggcgtacaggctaagagtctgaaaatcgatatatagccaatcgaatgtatctccttttacatccttgtattgcatctggaaatctacttccccataataatcgcctgccaggtcgataagcatgctaccgtcttcttcttcgaaaagatagcgcaaatcacttgaatccatcagaatacatccgccagggcgtaggatgcgtttcatccgttggaaaaaggcaggcatattatttagtgttcctatgatgcccgaaccattcatcagcatcagaaccgtatcgaatgtttcggtgaatgtttcgtcaaagagattgatgaggcgggaatctttgacgccgcgttgtttcattacctcgttggaaagtggagagatgtcaatggcgcaaacttcttttcccatttcttgaagtgccaatgcgtggcagccgcttccggctcctacatctaatattcttcccgtagccatttgcagagcggtacgttcgaggacaggcatggactgtatacttcggaataattccttaacggggatttcatcttcttcgaattgagaagagaatactcgcaagcggtcagctctgtgatgattgaaataatcggagattgcagctcccatcgggtccttttctgcggaaagggttattgttgccattttggtgattatgtattgttttatccgccaaagataaacaattccgtagaaaaggcttatctttgcatcagaaatgtgaatgctaacaatgtaatatatatgagtatagaagatgcaatcatgggtggaatcgtctttaaaggtaagaaagataagccccaggaggaggagaaagtgaagacgaaagcgaagaaagcgacttatattcgtggacaacatggttccggagccgcgaagatgaaagcggatattcggaaaaagagagctaaccgacataaaaaataaatgggaacaattgtttgtatactagcacttttgctggctggccatggacttggtttgatcattaagatgagaatgttttgtcttttaatcaagagagtcgaaacgaaatacattaagaagatagatggaatagtagtggatgttgatacttatgtgaaggatggaaagcttcttatgcgcccgtctgttgaatttacattagaaggagagggtgaaaaatgttgtcggtctatcaatcccaatattattgtggaggatatcacacaattttcatattacccgaaagattttcatataggtgataaagttacagtttggtataatttggataatgatgcaatgtttgtcgagcaaaaaatgcaattgacaagattgtttgttcgtttatttattcccggatgttttttcattatttcaagcattttggggatgtgttatgtcatgaatagctaacaaccttataaaaagaagcggggcaggatgatcaaccggccccgcttctttttataaggttacttcttttgtggaagtatctctatccagtagtcatccgggtcgttgataaaataaagccccatggctgtattctcaaaacagacacaattcatttctttgtgatattgccgtacggcgttatagtcgccggctacacgaaagcataaatgactttcgttttctcccagttcatagggggaggtatgatctttcagccaggtcagttccagtaggaagccggtttcgttgtccgtcaggtagaccaggatgaaagaaccgtcggaagcttccttccgactatgttcttttaagccaagcgctttttcataaaaagcaatgcttcgctccagattcgttacattgatattaaagtgatcaaatctacttttaatttccatgattgctatcttgttattttttcatcaatagcttcacgatttctccgacatacgtacggggttgtccggcttgcggagtcgtttgtgaaggcagtttcttacattcgataacagccgaaggggtcgtttggttcggagcgtatagtttcagtgtataagtttctgctttttctatcgcttcgtagggctgatcggcagaaagtgtgcaataagctacggctttaccgttttgataacccagtgcgccgcctgcgttggctgtcatattggtcatgttgaattcatctttgccgatagagatcaccagttttccattgcccatcaatgcgtatacatcgcccggaatctgcttcagatcgatttctgtatatcctggcatatctgctgaagccttgccgacaggagttgcaggagttaaagtagcagcaggagtagttgtctgatctgcttctgcagtggtaactttaccgccctgaccaatcaccagcggacctgcagcagcaacgatagacggcttctgtgcttcttcttcttttttctttttctcagacttcggacgagtatcgggagcaccgaaggctacagctacatccataaagatgtcatcggcaaagtctaccgtttttctgcgccatttagccaagccgcgtaccagtttggttttagctttgttcagtgcatattcatctgtaatccattcttctgctttgtatttttctgtttcgcggtaggtgaaacggattttttccagttctaccaagcaactgcccggtttgcaggtaacagtgatctgataattgacccaagtgcggtccaatgacagggcgctggagtaaaatgtgatccattcttcacctacaccggcgatggttccttgtgcttcatcgctgaaaacgacgcggctgtccggattattgttttctttcagacgttcgttcatccacttcatgacagtgtcgtagatctgcttctgactcattccgggaatctggaattccttggaaaatactactttaccatctactacaggaacagctcccgcaaggtatctggtatcatctcttttttctttgtgcgattcggctctcattgccattggcaggcatgtgagaagcatggtaagaaacaggattgttaacttattcataattattattgtgtttatttggttatttcaaaactttcgccccgatgggtgatgctgacaaaccggcatcctgcattttcggcaaaatcacggagggcatttccgccttcgtagtcttcactgaagtgcatgggtacaaatatagtagtttttatttgttcgatgaactgttttgcacctttcatataatcttttcccatcctgcggtccactgggaacagcgctaaatcgatcttcggtgctttttcttttaaatatttaacttctgcaaggaagtctccgttggcttttcgtatctccgcttcggtagattcttcactccagtgccagttgttcagatcgcctgcatggaagatgttccagtcttgcagatggatcaggtacgaactgccgacatcggtcgagccgaatgcttcgatgcggatcgtctcgtcttcgtaggtttctccttttttaatataagtagcgttttcgggctttccacgatggcttttcagaatatctttggagaaaatgtaccggatgtcgggacgtgcttctttccacgtcagtatttcacggttgaagtggtcggggtgaaagtgagtggccaatacatagagtttacccggtctttgcaggaggtagtcatgtacgattccccggttatgttcagtttccgaagaatctttgtaataatcgatgatgacggtcacaccttctgcttcgatggcaaaaccgctatgataaatataatccagtgtcatgagctgattatttttacagttgcaatattacgtattctagttggagttggcaagaaaaatcagtgaaatcagggagaaagtcgattgatttcccattttccatccgtctttagggtatacaggaagcgatcgtgtaaccggttggggcgtccttgccaaaactccatccgggtaggagtgacggcatatccgccccagttgtcagggcgttccacttcttttcccagccatcgggcagcttctttaacgaaagcgcgtatcagttgcatccggcttgcgataggctggctttgtggagagatacgtgcaccgatgcggcttttataagggcgctttcggaaatattcgtccgattcctccggagaaactttcgcggcagtaccttcgatgtgtacttgcctttcaagttcatgccagacaaaggaaagtgaaatgtacggattttgtgccagttgccttcctttgcggctttcgtagttggtatagaagataaactttccgtcatgcagtcctttcagcagtacggtacgggtcgagggtctgccttcgggagatacggtacctacaatgatggcggtcggttcttctacgtttgcgtcgatggcttcctgtagccagcggctgaaaagtgaaagcgggtcgcagggaagttcgctttcccttaacccgcttttggtatattcttgccggatatcagctatattcttcattcattcaagattcatgatttctaattccaaatttctacatcggtacttctatcaataagatatgtgagtccttcaatgtttcgagttcgaaacttttcgtatcatagacgcccattccgtcgcgacgtttcagtacttctccgtctactacgatttctccttcaatcaggaaaatgtatacgccgccatgactttggtgcaagtgataaccgagtttctttccggcttccacctttccgatagaaaaccaggtgtcttgtagaagtgaagcgggagtactgccgtcgggcgatacaatcactgccagttcgttcggtcgttccagctctttgatgctaaaatccttgtagacaggatgtgtattccgctctctcggcataatccatatttgcaggaattctaccggttctacagggctggcattcacttcactgtggaaaatacccgttccggcactcatcgtctgaatctctccgacagtgatgatacggctgtttttcttgctgtcaccatgttgcagatgtcctttcaatggaatggagataatctccatatttttatgcggatgggtttggaacccttctccgggggcgactttgtcgtcattcaatacgcggagggcaccgaagttgatacggtcagaatcgaagtattcgtcgaaactgaaggtatggtaactatccagccagtcatattgggaatgtcctcttgtatctgctttatgtattactttcttcataattttctccttttctaattgtttatatacttctgtaacaagggaagtcaggtaaaggttctatctcttcacttcatttagcaaagacttgtggttgatgaaatccttgatattctgaagtgtggtcatggcgatatttcccattgcttcacgtgtgaaaaaggcttgatgcgaagtgacaatcacattgttaaatgagagcagacgggcaagcacgtcgtcgtcgatgatgcggtcggactggtcttcgtagaaatattcgctttcttcctcgtacacatccaatccggcagaaccgattttcttgttttttaagccttcgatcagggcattggtgtgaatcaattgtccacgaccggtattgatgatcatgactccgtctttcattttgctgatggagtagtcattgatcagatatttggtggcttcggtaagcgggcaatgcagggaaataatgtcggaactatggtacaattcgtccaaagaagtataaacgatttgttcttccctggcaaagttgtagtcgggataaaggtcataagccagtatattcattccgaatccctttaagatatgaatcagaattttggcgatttttcctgtaccgatgatacctgccgtcttaccgtgcatgtcgaatcccatcagaccgtgaagggaaaagtttccgtcttttgtacgccacgaagcgcgtggaatctttcggttgagagagagcatgagtgctacggtatattcggcaacggcataaggcgaatatgcaggaacccgtacaacggtgattccggcagtggcggcagcgttcaagtctacattattgaatcctgcacatcggagtgccagcagttttactccgttggctgccatagcatgaatgacttctgcatcggccgtatcgttgacaaagatacagaccgcgtctactccttgcgtcaatagcacgttattcttattcagatgtcctttataataacggaattcaaatccgaactctttgtttttatcgttgaaagaagcttcgtcataaggctttgttccgaaaaatgcaattgtataggccataatattttctgtttttattcttattaataaacgtaaaaacagggtggtttgtttatctttacctttgctctgaatgtgaattgtttcattagaaacagtttttgttttcaattaaaatgagtggataaacgaaaataagtgcacaaacatgtgttgcgtgtgcaggaatattgtatctttgcgcccgaattaatttaaaaaagatttagatgagaaaaaatttcttgattggatttgtaatgttaatcgtttcaattccaacttttgccggagattatctaactaatacgaatcagaatgctgctttcttgcgcatgatagcccgcggcgcttccattgatattgatggagtttatagtaatcctgccggactggcattccttccccaaaatggtttacaggtagcactgactattcagagtgcatatcagactcgtgatattgctgctacaagtcctttgtggactatggatggacagacttccgtgcgcaattatgaaggaaaagcttcggctcccgttatcccttctgtccatgctgtatataagaatggtgactgggcattttccggtagtttcgctatcgttggtggtggtggaaaagcttctttcaatacaggtttgcctatgtttgatgcagctgctatcggcttggtaaattctacaagtgatatgttgaaacctaatatgtacaatatcaattcagccatggaaggtcgtcaatatatttatggtttgcagttaggggcaagctataagattaatgaacacttttcagtttttgccggtgcccgtatgaattactttacaggtggatataaaggttttctgaatattgccttgaaagaaggagtagcaggacagatcggtgctgctatagtacaacaaattatgggggctaatcctaatttgagtttagaacaggcacagcagattgcacaagaacaatctgcacctatgcttcagaaactgaatgatacgaagcttgaactggattgtgaccagacaggttggggattgacgccgattatcggtgtagacgctaagttcggtaagttgaatttggctgcgaagtatgagttcaaagctaatatgaatattgagaacaatacacataaattggaatttccggatgctgctgctgcctatatggcaccttatcagcatggtgtgaatactccaagtgacctcccttctatgttatctgtagcagcaagttatgaattcttgccttctcttcgtgcttcagtagagtatcatttctttgatgacaagaatgcaggtatggctgataacaagcagaagacattgaaacatggaacacacgaatacctggctggtgtagaatgggatataaacaaaatattcacagtcagtggtggttatcagaaaactgattatggattgagcgatgctttccagacagacacaagtttctcttgtgattcttattcagtcggtttgggcggtcgtattaatcttagtaaggcgttaagtttagatgttgcttatttctggactacctatagcgattataccaaagaaaatccacgtggcttgggtgaggctatggcttcaatggataaagatgtttatagtcgtacaaacaaagtgtttggtgtaagtgtaaactataagttctaatattaatccgctacgattttatataatagaagccgtctcgaacattgttcagaggcggcttctcatattatatatacctaatattatatatgtatatgtaatagattagaaagaatattgtaccagcatattcaaccgattggcatggcgggtagaagagttgaaatcagtgcgccatcctctcagatattcaacacctacttgcatattgctagtcacattccagaaagcatttgctacgaaatactgtccttttcggtatgcttccggattatcactcggatagttgttttcagagtaaagtctggataagctgtatgtaccggatacaaagatattcgggcaaatattatattgcaaccccgcataccaacccagcatcggaagaacctgcatcttgccttcattatccggatcgggaacgatgtccacattcagattacttaagtcgttcagataagaaccgattccttttccataattaaactgtccgaacacttgccacttcttggttacattaaaggtggtagatgcttgcaggccaaatccggtagtcgaaaaagccttgtcgtgcacattacttgaataagtcatgctgcgtacgattgcacccaacttaatatgactgttactattccagttatactgtgcagaagctgcaaaatccggcattcgttgcgtgttgatagatacatcgctattcgttgtaccgtctaccgaaggcatttccatggcaacaccgaatctccagtttttcagtttatcgcacatataactcagttgagtggtacgatagaaagcggaaccgttcggaccggcaaagtcaattgttgcgggcagagccgaaaggtccatgaatgaaccgtagctgtatccgatggtaaatcctaagaactgcgcatacgcattttgaagttcaaacgtcttcccatctccacggaagtttccggcggtatacaccacgaagtcgcccagatgcttggttcgtcctaccaatttcaggaatagggtagaagtggtgatgtccatctgaaattgattcttggcaaaatttccctttccgggctgtccgatcaatgccggatagaaatccacatcgtcaacgatgccgttgaaatcatactctgccgtcgcacgtacgtagccgccgataccaagggcgaatttccctttctgatccgtcagaaggaagcggggagcattcgggtcgtgaaaacgcatctgagagcggtcgttcatgattcggatgatttcatctccggccttgtccctggagacgaacatgatggaattcggttcctcatcctcgatgactactttcttttgcgcatgagcacagacggggaaaattccgatccccagtagcatagctaccattttaaagcttgttttcattatcagttaagttttaggtgaatgcccaatgaacaactaaaaaaagaaatggttgagaggggctaaggaaaaattgccaaacttatcggaagaattgctatttataatcgttctaaaaaagcggatctttgtatcgtactaattagataaataaaatacgagaatggaaaaagtagattttactcaaggaatattggcgatggagtcagacctgcatcgtttcgcatataagttgacttcagaccgtgattctgccaacgacttagttcaggattgtgtattgcaggcattggataatcatgagaaatttacgcatgccaagaatctgaaaggatggatgtttaccatcatgcgtaatatctttgtcaacaactaccggcgcacggtccgcgaaatgaatttgatcgatgatacctattccatcaatcagcaaagtttgatagaagatgaagaaggcgaccgtttcgagtttgcttatgacatgaagcagctgtatagagtgatccattccatccccgaagatatgaaagttcctttccagatgtttgtagctggatttaaatacagggaaattgccgaaaaattaggattgccgatggggacggtaaagagccgacttttctttatccgcaagcgtctgaaagaagaattgaaagacttctcctgatgcaactttctaattgagtgatgtgttttaaggtcaaagtgaagccttcctgtcaaaatacgacgaatgacaggaaggcttatttaatttgaaatattcttccgaaatacttggtttataaaataaacctatttatatttgcatcgagtaagagagatgcgcagctccttactttttttaatctatatatggtttataaaataaactaattaaatcatatcaactaattgattggaggaaaggaaaagatgaaacgcttgttattcattgctttagggattatttgttaccacgttgttacttttgcacaagaagtaaaagtagaagtgcggggtattcgtagtgcaaaaggcgctattatggtcatggcacaacaggattcggaatcgaagccggtatatgcgatggctactgctgttaaagatacagtgactgttgttctaaaagatgttccatgggaaaagtttttaatctctcttttccatgatgagaacggaaactgggaattggacatgaatgaacagggaataccggtagaagggtatgcccgggaaaaatgcaagaaagaggcggatgcttcggctaccgttaaaatgaagatgtattatccggtaaatgactaacagtatgcgatacctgatatttctgatattggccggctttaccggagttactgcttgggggcagacttcgacgactgctcggccgatggctgtgaatgatactctgacagaagattccacttatgcgttgcaggaagtggtggtacggacaagtcctgtgaaacggaaggcagaccgttttatcctgtccgtccctcctgcacagaacaaagacggagtcgaactccttcaacaagcgcccggagtatggttgtccgacgagcggatttccatcaatggttcttccggcacgaaggtgtttgtagataatagggagataaaacttaccggagagatgctgataggctatctccgttctttgaaatcggacgatattgctcgcgttgaagtgcttccaatggcgggagccgataaggatgccgatgctcagggaggtgctatacatattataatgagacgtcatacggacaaaggatttcagggaaatctttctatgaatgcttcctttgcctcttccttgcaatcttatcagcctagtggtagcttgaattatcatagtgggaagtgggatacctatggatttgcttccggtactttggttcctcagaataaaggagatttgtacgttacccgtgattatgtagcgggagataaaggtttttccagtctgacccgtatgaagcagccttcgcgttacgggacgattcggatgggaacagtttatacgatggactcttccaatagtctgggagtagagctggagtatgttcgtcgcggatacatctggccgtctcagagttactctactctgtcggtaggaccgctggatatggaaagtcagggtgtgtatcgtcagaaagagacttacaatatgtatacagctactgccaactatatacataaactggataaggacggttcggtgctgaagcttgttaccgactatatctctaaagatctgcatggcagaaatcagtatcaaatttttcaggagataggtgctctaaataaagataccgtttaccgttcccgctctaatgccacttatcagatcgcaactgccgatctgtcgtggaaacaacagttacataagaaatcgtttttccagataggaatgaaatatacctatacgggaatgaaagatgatgcctgttacgaagggctggaacctgacgaaagttggaagcccaatgttgcttatggatatgaactcgattatcacgagaatatcggtgctttatacggaacttattctctggatatgaaaagaggatctgttcatattggacttcggggagaatatacgcaaacctccaatgaaacagaacgtcggacgagaaaatactgggattggtttccacatatcgatggaaatttctattttgatgaaattcacaagtggatgcttatcggtcagtatggacgctatatagaacgtccgactttttcggctctcaacccgaaccggattcagacttccgaatacagttatctgataggcaacccgatgttgcgtcctacttatattaataaattcagtattacgctggtctataacttccggtatacattgactgttggcggcaatttgcaccatgatctgatccgtcagtttggtaaagaagatgcggagaattcggatatatcatatgtcatcaatgagaatcacaatcgtgagaaccattggttcgtagccatcactgctccctggcagccgctcaattggctgaatctgaatgccagctttatcggagtgaggcaagatatccgcatgtatcgggaggacgattactttgggcacttcctttatttcgccaatgctaatgctacggtccttttaccgtcagactattcgttggaagcacaatataatggagttagccggttgtattccggtaatagcgggatcgatcctcgtcatacattcaacctgcacctccgcaaaaaatggaaagacgggcgttgtgtagctactttgggggtagacaatatcttcaaccgatataattcttatttcagcaatgtaccgagttattcatctcaaaatcgttttgaactggcttcgagcggaagactgatgaaactcacatttacctggaatttcaatcatggaaagaaatcgggtgcggtgactgtagaaaagaaatcggcaagtgaaagaagccgtatcgaaggaaaatagacaaggatttttggtttattacgtaaacaatattatttttgaaacaaaattgatagaatatggaagacaagagaatttcagagaaagagagtttggaactgattgcccgcatgattcgggagacgcaggacaatacagcccgttatgcagcctacccattattgatatggggatatactactgtggctatatcacttgtggtatggtacttttatttgcagacgggagtgtggcagatcaattttctctggtttgctttgcctgtcattgccggaccgctgactatcttttttaataggaaagacaagaataagggagcaaaaaattacatagaccgggtgactggtcagatatgggctgtgtttggagtagtaggtttttgtctgtcttgcatggcatttgttgtccgtattgatattctgtttgtaatttccttattgatggggatgggggctactcttacggggttggtatgtaagtacaagccgcttagtatagcagggatgactggtatcgccctttctttttccatgctttttattcatggaagcggggtatatctggtgtttgccgccatctttatagtgatgatgattgtccccggacatattatgaataaacagatgaagaagcaatgtttaaagaactgaatcctatcttgcattcacagcttcgcttggctataatgtcgattctgctgacggtggaggaggctgagttcgtctacttgaaagagaagacccagtcgacagcgggaaacctcagtgtgcagttggataagctgagtgaagccggatatatcgaggtggaaaaaagctttgtaggcaaaaggccgcgtactgcctgccggatcactgccggaggcaggaaagcgatggaggaatatgtggagacgctgaaggagtatctttcggggttgtagttcatgccccgaataaagttatcggataactttgccttctcgcttttttcttctacctttgcaccccgaaacaagtaaaaagatgtatgatgccgtgaatagcggtcgtgtattctagaacaccacgtaaaaaacaggagttatgaaagaaaaagtatcagtaccttttatgttgctgggcattctcttcaatgtatgcctcattgcagccaatcttcttgaaacgaaagtaattcaggtcggcagcctgactgtcacagccggattattggtttttcctatttcttatatcattaatgattgtatcgccgaagtttggggattcaagaaagcacgtcttattatctggagtggttttgctatgaacttctttgtggtagggcttggcttgatagctgttgcgatacctgctgctccgttctgggaaggcgaagagcatttcgattttgtattcggtatggctccccgcatcgtagcagccagtttgatggctttccttgtcggttcattcctgaatgcgtatgtgatgagtaagatgaagattgccagtcaggggcggaacttctctgcccgggctattctctcaacgattgtcggcgagactgccgattcgttgattttcttcccgatagctttcggaggcatcattgcctggaaagagctgcttatcatgatgggacttcagatcgtactgaaatctatgtacgaagttatcatccttccggtgactatccgcgtagtgaaagtgattaagaaggtagacggcagtgacgtgtacgatactaatatttcttataacgtactgaaagtcaaagatatttaatgaaacgacttcttccggcctgcttcgagggctgagaatataaagagaattttatgatgaacagagagactgcattggttgtgttcagtggcggacaggattctaccacttgcctcttttgggcgaaacgcaactttaaaaaagtatacgctttgagtttcctttatggtcagaagcaccagaaagaagtggaactcgccagagaaatagcccgaaaggcagaagtggaatttgatgtgatggatgtgtctttcataggaacattgggacataattcgttgactgacaccacgatggtaatggatcaggaaaagcccgcaggcagcgtccccaatacttttgttccgggacgtaatctgtttttcctgagtattgctgcggtatatgcccgcgaacgtggcatcaaccatttggtgacgggagtttctcagactgactttagcggctatcccgattgccgggacgcgtttattaagtctttgaatgtgacattaaacctggcaatggatgaacaattcgtgattcatacccctctgatgtggattgataaagcagaaacttgggctttggcagatgaattgggagtactggatttgatccgtaacgagactttgacatgctataatggcattcagggggatggttgcgggcattgtcccgcctgtacgctgcgtcgtgaggggctggagaagtatttaaaaaagaagaatcaataatatctctacatagagactaaaaacgtgttttttattgtcacttgtcacttttgaagattaactccttgattacgaatgaataaagggtgataatagatggtgataatagggtgataataaccgataaatgcttttttattgtcacctttattgttgctgacagctgcttgccattctattattggtgttcgtttcatttcgggatgtgcaaggataaagagtcattgtcggttgtttcaagaagtttcaaccgcttgaaactttggttccatacgcttgaaactctagtttccattacttgaaaccatagtttcatacgctcgaaacttttagtttcaaggctttgaaactagagtttcatcatggtgaaacacttcattcctttataggaaacgactaaaagcaacggtcgttttgataaataggagtaccggatgataaataggagtaccggatgataataggaataccggatggtgaaagatgaaagatcggtgatagattgcaatcatcaatctttcaccactgaaccatcgatggataagccgtttcagtgaatatggtgacaggtgaaagatgttttgcgttttttctatatgaagagagtttaaaactatattaaacaatggctgaattaaaagaccaactttccttattaggaagaaaaacggagtataaacaagactatgctcctgaagtattggaggctttcgataataagcatccggaaaatgattactgggtacgtttcaactgtcccgaatttacaagcctatgccccataaccggacaacctgactttgcagaaatacgtatcagctacatccccgacattaagatggtggaaagcaagagtttgaaactttatctgtttagcttccgcagtcatggcgcatttcatgaagactgtgtaaacatcatcatgaaagatctgataaaactgatgaatcccaaatatatcgaggttacgggtatctttactccacgtggcggtatttcgatttatccgtatgccaattatggccgtccgggaacgaagttcgaacagatggcagagcaccggttgatgaatcgggaataaccagatataaaaataataatacgggcagaatatgactcataatatacctactgaattgcagagatacgtgcaggaaaggattatcccgcaatatgccggctttgataaggcgcaccagatagaccatgcagaaaaagtgatcgaagaaagtctgaagctggctcttcattatgaagtcgattctgcaatggtttatacggttgccgcttatcacgacttgggtttatgcgagggacgtgaatttcatcatatcgtttcggggagaatactgttggcagatgaaattttgcaccgttggtttaccgatgaacaaatgctggagatgaaggaagcgatagaagatcatcgtgcctccaataaacaggctccgcgaagtatctacgggaaaatagtggctgaggcagaccggattattgatccggaaataacactgcgccgcaccgtacagtatggtttgtctcattatccggagatggataaagagcagcagtatgaacgcttccggaaacatcttgccgataaatatgcagaaggagggtatctgaagttatggataccccagtctgataatgccggacggttggcggaactccgacacttgattgcaaatgaggaaaaactgagagaagtattcaacaaattgtatctgcaggagaaagattgacttctttaaatttaaaatgtaggcttacatttaatttcctttttaattcctatctttgcattaaagaaggtatatgatggagcaggacaagtatataactcagttttctacttatcttttctgggatgtgaaaagagaagatttagatatggaaaaacattctcgatatataataaagagagtgcttgagtatggtatgctcctcgactggaagatggttctacaatattatggtcttgatagaattgtagagttggctaagacttttcgtgatttagagcctcgggctctagcttatctttgtgctatatctcgcactcctaaagaacaattcagatgttacacttatcaacagtcgaacccgcaacactggaacttttaagaaagttacagagtctacctatactaaataatacacgtttggtaggtggaacagccttagctttgcaattcgggcatcgaaaatcagtggatttagatttttttggtcacatagatgtggattctttagatttgcaagaagctttgcaaaccattggagcattgacgacattgaaagattctaagaatattcatatctattcattggatggtattaaaatagatattgtaaattacgcatatccttggttggatgatgtcgttattaagaatggtatacgtttggcgagtaccaaagatattgcagcaatgaagattactgctattattggaagaggtaccatgaaggattttgttgatatttactatcttttgaagagaaagtattcgataacagatatcttgaatttttatactcagaagtatccggatggttcctgttttatggctatgaaaagtttggcatattttggtgatgctgatttcgatgtgatgccttatatgttttctgatataacttgggatgaaattaaagaatttataataaatagtttaacacaatgttaacgctatttattcatgatgatacggccctccattcaatatcgtcattgcccgataaatctgttccacgaagatcagccgtatcatctgatgtgaaaacgtcatcttcgacattgaaatcttttcattagctacctgatacaccttctccgaaaatccgtaaggaccaccgatgacaaataccaaccgcttattcaccgtattcatcttccgtttcatataatcggcaaattcgagtgaacgcatttctttcccgtgctcatcgagcagcacgatcacatcccccggttgcaacgctttcaatatcagttccccttctttctccttctgctgatccatcgaaaggctcttggtattcttcagttcggggatcacttccatatcaaaagtgatgaagcgtttggtacgctgaatatagtcattaatagctgtaatatagtgttgttctacggttcgtccaacgacgagcaaagttgttttcatgcgtctgatattctgattcgagcacaaaaataggcattttttatgttattctgcaattaatgcttacctttgcctatcattagttgaaagtttaagcctttaaacttcaacccaaaagcttggatttatgaagaaacgagtgcttttaggaatggcctctttgcttctttctgtctcattgctgatggcgcaggagataccggcaggagtgattacggcatttaagcggggaagctcgcaggaactgagtaagtatatgggagacaaggtaaaccttgttctccaaggcagctcggcaaacgttgacaagaagaaagcaacagtaatgatgcaagagtttttcacggaaaacaaggtcaacgcatttgacgtgaatcatcagggaaaacgggatgaatccagttttgtcataggtacgctgacgactacaaaagggaaattccgtgtgaactgcttcctgaaaaaagtgcagactcaatatttaatacaccaaataagaattgacaagatcaatgaataaggaaaaagaactgatcgacaaactgatcgatcttgcttttgcagaagatataggtgatggtgaccataccaccctttcgtgtattcccgctactgcaatgggaaaatcaaaactactgatcaaagaagccggtgtactggccggaatcgaagttgccaaagaaatcttcaaccgtttcgacccgtccatgaaagtggaagtgtttatcaatgacggcactgaagtgaaaccgggcgacgtagctatgatcgtagaaggaaaagtacaatccttgctccagaccgaacgcctgatgctgaacgtcatgcagcgtatgagcggtatcgcaaccatgacccgcaagtatgccagacaactggaaggcactcacacccgcgtgctggatacccgcaagacaactccgggtatgcgtatcctcgaaaagatggcagtcaaaatcggtggaggtgtaaaccatcgtatcggtctgttcgacatgattctgctgaaggacaatcacgtggattttgccggaggcatcgacaaagcgatcaaccgtgccaaggattactgcaaggaaaagggcaaggaactgaagattgaaatcgaagtacgcaacttcgacgaattgcagcaagtgcttgacttgggtggcgtagaccgcatcatgttcgacaactttacgcccgaaatgacaaagaaggcagtcgatatggtagccggcaaatacgaaacagaatcttccggcggtatcactttcgatacccttcgcgactatgccgaatgtggcgtagactttatctctgtaggagctttgactcattcggtgaaaggacttgacatgagcttcaaagcatgctgaatctataaatgatgaactgataataaataagcggtgaacagtgctgttgctatcatgctgcagctgttcaccgtttattatttacgaatcatcatttctttaacttcttttagcaaaactctttgcagcattcctcaaatacttgcgtctaaaggataaaaacggcgcagacatacgttcgatttaaaaaagacaattggcattggaaaacgagatagaactgataaagggctgtcgggcaggacaggattcagcccgaaaggaactttacaccctctatgccaaacaaatgttggcggtatgctaccgctatacgggcgatatggatgcggcgcacgatgtactgcatgacggtttcatcaagatttttaccaacttctcgttccggggtgaatcctcgctttgtacgtggatcacacgggtgatggtgacacagtcactggactatctgagacgggagaaacgagtcaatcagttggtagtgcatgaagagcagcttcccgacataccggatatttcgtcgtcgggaggaggagcagggatctccgaagaacaattaatggtgtttgtcgccgaattgccggatggttgccgaaccgttttcaacctttatgtgtttgaagagaaatcgcacaaggagatagccgggatgcttcacattaaagaacattcgtctacttcgcagttacacagagccaagtatttgttagcaaaaagaataaaagaatatagaaatcatgaagaaagaaaatgatgaaataaccgatctgtttcgcactcgtctcgctgatgccgggatgactgttcgggatggcttttgggaagagctttcgcaggatatccctgtggcttgccagcatcgccgtcggttgatattcttccgtgtggcagcggcagcatctgtgttgctggtattggctgcatcctcagctactttctggtatctttctccgaaagaagagatggaggaggcgtttaccaaaatcgtggtggcgaacagcggaagaatggatggagatggtgtacgcgctaatcagttgccgacggcaatggaacctgtattgccgaaaccggcacctaaatcattcggattattatcgcagtatccggaagagggagactcggtttccatttccttctccatgtctttctctttctcggcaactaccaccacgggaaatggcaaccgatacggcaaccaaggtcgcaacggttattggcaggcgaataatggtaacacagaaccatccgccgcacaagaagaaaaatatactaccggtacacctgctccggtggaaaacgtaaaaaaacatcgctgggctttgaaagcgcagatggggacggcacttccggcagaggacggtgcctacaagatgccgatctccgcaggagtcactgtagagcggaaactgaatgattatctcggaatagagaccggactgctttattcgaatctgcgctcggaaggacagcacctgcattatctgggcatcccgctgaaagcgaatattaccttgatggatacaaagaaaatcgacctctacgctacggtaggcggagtggcggacaaatgtatagccggtgcgccggacaacagttttaaagaagaacctatccaactggcagttactgccggtatcggaatcacttacaaaattaatgaccgattggcggtttttgccgagccgggtgtttcccatcatttcaagacggattcgaaactggctacggtacgcacgaaacggccgactaattttaatttactttgcggacttcgcatgacgtattaatccttatgaaaatgaaaaaaacacttatgatgctgtggatggctgttagcctgatggtatccctggtgggatgcagcagcgaagaaatggactatgagaatcccgatgtaaccgtttttgtgaaacagctgaaagcgggtacctataatatgaagaatgaaaaaggggtcgtggaagttcctcatttcactgaagaggacattcccgaactattgaaatatgcggaagatctgactattattccttctttcccgtcagtctacaatacgaataacggtaaaatccgtttaggtgaatgtatgctttgggtgatagaatcgatccgtcagggaacagccccgtcgttaggttgcaggatggtactggcgaatgccgaaaattacgaagccatctatttcctgaccgacgacgaagtgctcgacgcggcagcctgctatcgtcgatggtgggaagggcggaaatatccgaagacgacctggacgattgatccgtgctacgacgagccactttgtggctcaggataccgatggtggtaaaaaaagaaaaatccttcggtgtataaaaactaaaaaacatgaggcaacgtttatttgtatcagcagtctttgtactgccgacaggggcgtgctatgcccaaaaggaaacgaatgcgctcatgcgtgatgggggtacttgaggaatatagaaaacagaggtagaaagatgagtgaattgataaaacgtttgataacagctatgacactgtgcctgacagctttgcttgtacatgcgcaggaatggacgaaggaggattccttgcgtctgagaaagttgctggacagtgatcaggagctgaatttgaatcaggatgcagtcaggcagattgatttcggcagcgctgtcggtactccccgcatgtcggtggaaaagaagtggatgctgcccgatgagtcgcttcccgaagcattgcctaaaccgaaagtggtattgagtctgatgccctataaggcaaatactccttgtaattgggaccccgtttttcagaagaaaataagaatggataagaatacctggcgtggagatccgcattacgaaatgcgtcatcaaaggtcgtacagcaactgggcacgtaatccgatggcgggaggagtccgtaaatcattggaggagatacgggcgagtggggtacgtttccgtcagttgagtgaacgggcgaatggaatgatggttaattcggtagtgatggatagcccgattcctttgtttggaggcagcggcgtgtacatcaatggaggaactatcggagggcttgatctgatggcggttttcaccaaaaacttctgggataaaaaaggaaaagaacgtcgggagcgtacgttggaagtgttgagaacctatggggattcgacgactgtactgatcaatcgccccattgaacagattgcccgctgaaactgttttattaaatatggacatgtctcatgttccatgttattagattagcacattgaaaaacgattaatttatgaacagaattacttctcttttcggtattcagtatcctattattcaaggtggcatggtgtggtgtagcggatggcgtctggcttccgcagtaagtaatgcgggaggattgggactgcttggcgcaggctctatgcatccggagactcttcgtgaacatatccggaaatgccgtgcggctacagaccgtccctttggagtcaatattcccttgatgtatcctcagattgaagaaatcatggcgattgttgccgaagagggcgtcaagatcgttttcacttctgccggaaatcctaaagcatggaccggatggctacacgaacgtggtattatcgtggctcatgtcgtttcctcttcccgtttcgcgatgaagtgtgaagaggcgggagtagatgcggtagtcgccgagggtttcgaagccggcggacataacgggcgtgaagaaactaccactttctgcttgattcctgcggtacgcaatgcgaccactttgcctttgatcgctgcaggaggtatcggtacgggagaaggtatctttgctgccatggtgctgggagcagaaggggtacaaatcggaactcgttttgcgttgacggatgaaagttcagcaagtccggtcttcaaagaatattgtctgggtttgggagaaggagatactaaattattattgaagaaactggctccgacacgtttggtacggaataatttccgggatgctgtggagagggctgaggatggcggtgcttctgccgaagaattgcggactcttcttgggagaggtcgtgcgaagaaaggtatctttgaaggggatctggaagaaggcgaactggagatagggcaggtgtcggctattgtttcccgtcagcagtcagtagcggaagtcatgaatgaattggtggaggctatgcagcgggcagcggagaagaaatattggtaaaaaaacaagttccgaagtagtgggtttggaaaacctgactacttcagaactttactacttcagaaagttggctgcttaatcaatttataggtttatattttcatattttagatcgaatacatccgctacagctttatataccacttttccttccactacattcaaaccgagtgctagtgccgggtcgtctttacaagcttttttccatcctttatttgctaaagcaatgacataagggagagtagcattggtcaaagccagcgtagaagtataaggtacagctcccgggatattggctacggcataatgaacgataccgtctatcacataggtaggcgcactgtgggtcgtgggatgtgacgtttcgaaacatcctccctgatctattgctacatccacaagtaccgtaccgggctgcatcattgcaagcatatttcgggtaatcagatgaggcgctttatcccccggaatcagcacggaaccgatgaccagatcaacatccggcaattccttttttatccttaattcggatgcgtacagcgtcttgacatttttcggtaatgtctcgctgagatagcgcaggcgtgacagattaatatctgcaactgtaacatccgcacccattcccgcagccatctgcgctgcattacttccgacaataccgcctccgagaattaatactttggcaggcttcacaccggggactcctcccagaaggataccttttcctccttgcggcttttccaaaaagcgtgctccttcctgaatggacatgcgtccggctacctcactcatagggataagcaggggtaaagaatggtcttccttttctacggtttcgtatgccagacagatcgacttattgtcaatcatggcaagagtcagttccttatcggaagcaaaatggaagtaagtgaacaataactgtccttttctgatcagatggtattcgggcgcgataggctctttaacctttacaatcatatctgctgtggcatagacatcctctattgtcggaagcacctgtgcaccgacggacagatatgcttcatccggaaaaccactattgatacctgccgtatgctggatatatacttggtgaccttgcttcacaacttcggcaactccggaaggtgtcatgcctacccgattctcgttgttcttgatttctttgggtactccgatgatcatattgttatatattaaaggtttaacatggaccaatgtacgaaaaatccccttacgttgttattcgcaaggggatgtttaagagcagaatgcttatatacaattcggtcaatttaataaacccgggtttgcagcaatagcactttgtggaatgcgtagtgtataacgtgaatcatcttgttctaatagataagcttgtccgttcaacactttttcaattcgtggacgggtggtacgacgtagatcgaaccaacgatgaccttcgaaagcaagttcaagagcccgttcttccagtatttctttaattaaatctgcctgattcatagcatccacagcttttttcttttctgcataaccttccggagtgtatcgcttttccatcaattgtagcaggcgggtacgagcttcgggcaatttattcatttgtgcagctgcttcggcagcgtttaaataaatttctcctgtacggaaagtacagttatgctctgcttttccgctttttttcgagatgtacttatctccacttaaactatagtatttgttccggcggagatccttattagcatcatatttttccatgaacgcaggtatcaatatggatgctgaagtaacgtcatcattgaaaaactcataagcagtaatcatttctgctgatgtataattattgggaagtttggcttccggatcattgaggtcttctaatgtggatttttgaactaatatgcgttctgccgcatcataggcttctttccagtttcccatgtacaggcgtacacgtgattccattgcatccacagatagggtggagaagcggtaagcatatacggcttcccattctttttgatgcattaagccgcgggccgattctatgtcggatagaatagcagtatagacctcttttacggtgtttcgtggcagtaccacttctagatcaaggtcccattttatgggaatggatttggtctctggtgctccctctttagtataaggttgtccatataggttagcaagaataaagtgcatgtaacctcttaataaataagcttctccaacgagttgatcaatgtcttcctgactgccttcttttatattatctttatttgctattatagcatttgcataataaatcacactataatatactgcccagccaaattcccgggttccatctttgggactcatatcattccacttttcaatctctgagtagaaattttgagaattactgttatctgttaccatagctatgtctgtgcgaaattcagtgacggatttgtcgatgagttttagtccgtaagcggtagtcagtaaagcacgatattctgttagtgtagtagggattacttgtcctacaggttgaatatccaggtagctgtcacatgaagatagcaggatgcttcctatgacaaccattatgaaatatatttttttgatcatatatatttttcttgtttaaaagttaagacttagattgaaagtaactgatttaggaaccggcgttgaataaagattgctcattgactccggatccatgtagtttttgtaactggaaccaaaaacaaagagatttcgtgcttccaaacctacagttgctccaccgatgtttagtttatgcagccactcggaaggaaaatgataggccaggcgtatgttctgtaaacgtatgtaacttaactttttgacccatatatccagcgatttgtagagatctctccgagtgctgaataaataatagtcagccggattagtatttaggctagttaatgcaggaaactttccgtttttattttctggcgtccatctatccaatatatctctattcatattgcgtcccggatcgggatctgctatgtaataagtaggatctgtttttacatgtgcacctaagttataggagaaatttaagttcagttcccagttacggtaattaaatgtattcatgaatcctccggtgtagggagcatcggacgttccggcataactataaaaacctctctctgtttctttatctacgccaatgctgtattctccgtctaaatttcctttgtctgccatttggaatagctcctcaatagtgacagcttctccatctttattttcaatgtatatctgtcctgtctctgattttatccctttggtttttagggtgaaaatagcgccaaccggatacccttccagacttggagttacttgatccttttcagtcatcactttcaaaaccttattttggttgtatgcaaagttaaatgaagtataccatgagaaatctttagttgcaatgttacgtgtttgcaagtttatttcgataccttgattcttcatacttgcccagttgacagccatactggtaaatccattttccaatggtagcattttgttaccaatgagatcggtgccttttctgtaataatagtctacacttaggttgatagcctgattaaatacagagaaatctattccggtattataagaggctgttttttcccagcgtaatttactgttcggagcactattgatagtgatgctctcttcatttgaaccgggcaagatacttatatttccataagtaccaacgataaagggtgaagtgtttttgtcaatgttcccttgtaaaccataagacaaacggagagcaaggttatcaatccatttgaactgattaattaacggttcgtttgagatacgccacagtccactgactgagtaaataggtaaataacgatattttttatctacaccgaagagatcggagccatccatgcggacgctacctcccagagtgtagcgatccatcagtgtgtaagaaccattggcgtagaaagacgcaaaagcattttccttaaaacttttagtctttagtttccattcattggcttgtttggaatctctgaattccaggtttttgaacgttaatgttttggggtcatatccatatccggtagatgcttgattctcgtaccaatttttacggatttctgatcccgccattatttgtatgttgtggatgtcattgaatgtgttcttgtattcgccctgaactttccatgtaatttgggaagtcgtagaattggtcgatttgagcatcccgccttccggtatgagatatatacggtcgtttcctttgtaatatgcagagttttcacgttggttacgcagattgaaactgttagtaccggcatattcttcccgggatagttgatcccattgtacaccgacttgtgaagtaactttccattggtcgttaaagcgaagttctatatcgaaaatactattaatagcggtagtaattgatttattactggtattttcacgttcttccagaatattatatccttgtaaaagatcgggcatgctacctgttacgacatcataatcatacaagtaattgttattattgtcgaatggttcgaaataaggattggcaatacgggaataatagacaggattagtaagcccataggtatctgtcagaaaggtggtgtttttacgtctatttgcaaaaatagaaacacctactttcagtaatttattgatctgataagaggttttgctcgtcagattaaaacgacttaagcttactcccggaatattcccgttttcgagagtgtagccaagggagttataataagtcaccttttcgctacctccggaaatgctgatattatattcttgagtaatggcatctctgaatagtatatcattccaatcagtattaatactttttaagcggttgattgcgttttgagcttcagaagtaagcccttcccagcctttctcccgataaatatccattagattgtattgttttaatatagcggctactcctcctttttctgaatatacaggtatcggataaaatccccatttattgaaaggtgcttctttcatcatttgaagttccaagtttactttttcctcagaatttaggagattaaggcgggaggtctccaaattaggagtataggttaatttagtattaaaattgacaacaggctttcctgttctacctctttttgtagtaactacaattacaccattagcagcgcgagcaccataaatggcggttgctgctgcatctttcagtatggtaatgctttcgatatcgtttggacttaatccggcgatagatgattgaccgatgttgacaatatcattgtcagaagatttattgtccattttgggaatatctgttccttccagaggaattccatccaatacccacaatgggtcttgtgttccgttcattgatgcagtaccacgaatacgaattttggcaggtgatcctggtgcaccggaagtgtttgtcacggatacaccggcaatttgtcctgtcagcgcctggtcaatactttttgcagcacctaccatggcatccgaaacttcaactttagagatcgcagctgttaattttctacgttctagggtttgatatcctgttacaactacatctcccaatgtatgtgctgaagtttgaagtacgattcggtagctttttttgtcgctctgaagaactataacttgttcttcaaatccgatgtagctacaatgaatacgggttactttatccggaacggaaagagagaatttaccatcgatatctgtaatagtacctagcgatgtctgggatgctcctgcctttttcagttcatccgtatgaacgtagaccgaagcaccaatcaacggttcgttatcttcaccggagattactaccccggtgatagtacgattagccgcactggccattgccagtgcgttaacaaggaagcatataataatgcaaagatgttttttattcattaattgtaaataaacgtaagtgattgaatcgaattatttaatacctaaagctgtattgatacgtaaaatcatatcttcgtaatgataacgtgttgctgtatcagacgttccgaggcggctctgcaataatttcttaatccgcagtaactctccgcgtttcacggatattgcatccgagatacgattcagttgactaccgtagaagttgagaactcggtgagctcccattttatcttcctgtcggagcgaacgttgttcggccgcatagcagctacagaaaggagtggcatgatcgagcaagaaatgatcgtctgcaatctttttattgattttcacagcttcgggctctgcggcagctgtgagtaatgcatccagaaagtttttttgcaaagagcgttccatcacattgggaatacctcctcgttcggtaatgccgaaaatattcttgtggagtccgtccattagttccactacggtaaacgctttttttccattgactgattcattttcaatcatacgcatcagacgggtgttgccaagcaagtcccaaaggatgtaggcttgtgcattcttcagtatctgcgtcggggcgttttcttgttgtccaaccggggtgttacggagcaaataggtatattttcctacttccgtatcgaacaaccatttaggataagtcagtacttcatctgtcagaaacttcaaggaagcctgttgcttctctttctcaacgaatgtgtaggtctggacaccatctcctatgactgtattttcgatatagataccaccgatgttggctagtacgtgatacagatagttgttccattgattgataatcgcgtaatagaggcgtgaggcttcttcgtaagtctgtcctttttctccggtagtagtccattgaaggatttgcggaacgatgcgtttcaggttgtcaatgccaagtaaggaagaacgtacgggatcatcgcctaaatcttcattctgtgcacgtggatcaacggcatcacgtacatcctgtgcttcactatatttataaagacggtcggtatgcttgctcaggaaatcaaataagatatctttttcttcttccggactattttttccgtaccagcgatatccatattcgatggcaaagatatcgtaaggaccgatatgcggggaaagaaccttcacgccatctcccggttgggctatgtagttgaagcgggcatagtccataatagaagaagcggtggaatttaatcgggaagtgaacgttgcggaacgtaaggaatcagttgggaacgctgccgatcccatcatgttgtgacgcaatcccaaagagtgccctacctcgtggcaggcaacaaagcggatagcatcacccaatagtgaatccggcaactgcacgctgcgtgcttccgggcaaacagttccggtctgtactgtaatccattcgcttaccatagagagcacattgtgccaccacatgatgtctgcttccagaatctctccggaacgggggtctaacaaagaaggtcccatcgcattcttcttttctgaagctgcgtaggtcagtacggaatagttcacgtcatccatatctatttccatactatcggtaacttcaatggcgatgattgcattcttgaatccggctttttcaaaagcgatctgccagtcttcaatacctctttttatatatttgcgccattgataaggtgtggaattgtcaatatagaatacgattggtttggcgggttctaccacctttcctttcaggtaagcctcccggtcttccggtttgggttccatacgccaacgggtgataaactgctttttatccgttctttgctgtgcatcgctgaaactcaatagcggattggtgaaataacctattttctgattatcaaaacgtcccatcattggagtttcaggtagcagaaggatagaagaactgacttctaccgttacatatacgcttgttgttccttccgtcactttagtagttagctcggaagtggcaactacattgttcggaaaggatttcacggataagatacgtgatagatttttaatagccgatgttcccagattgatattggtaaatacattattaatgctggtttccgtaccgtcatagatgtcgttgatcttgatcaccaatgctgtagagtcctgattgacagcctctatcttgaatgcggcaataagcggtgatataaaattgtccttaaccgaacggaaaatagcatccgtctgaggagccagaggtaacgggcgttgttggcggaacatcagtttcccggttgctttgtcccattccatgcaaatcatttgattttcataatttacaccccggtttactccagcatcgttcaattcagccggtactcgttgtaacttgttgacaacaagtaaatcgcgccctagcaatgatgtgggaacctcaaaataataatcgttctttttttgataaacggcaaacatcccttttttaacactgctgccttccactaatttctcgtagtcgctttttactctctcttcttctgaattttttttctttttctttttgaaccaactcagattttctgtagcaggggtagttgcaagtgctgagtacgcttctccactcagcaatatacatgcaatgaccgctgccattacctttacatacattctcattaagtccttttacttttaattattattaaaaacagccgcaaaagtaataatattaataatataatgattacagtttagttgcgaatataataataaaaggaattattaactaggttcatctgctatcattcttcccggatatttcgtaatctagttggaataatgtacatttgcaggagtaaaaaagtgaagaagataatgaaaagatatattgctgctttattattggcctgttgcgtggaggggtatgcacaggaaaaaaagcaggctgcctttgtgccacctttcgactttccccttacattgagtggaaacttcggagaaattcgttccaatcactttcatggcggattagattttaagacgggaggaacaatcggcaaaccggttcgggcacttgctgacgggtatatctcacgtatacgtgttaccaatggttcggggtatgtgcttgacgtctgctatcacaacggctattccactatcaaccgccatttgagcgcttttctgtctcctattgccgaaagggtaaagaaacttcaatatgaaaatgagaactgggaagtagaaatcatccccgaacccgatgaatatccggtgaaagccggacagcggattgcgttgagtgggaataccggatactcattcggaccgcatcttcatctggatgtgttcgagacggagacgggagactatatcgatcccatgcctttctttaaaaagaatctgaaagatacacgtgccccgaaagcggatggaatcatgctttttccgcagcttggcaaaggagtggtcagtggaagtcaggaaaataaaacgattctgccgaacagtgaacatccggtggaagcatggggggtaatcggcacaggtatcaaagcgtatgactacatggacggggtaaataatcattatggagtgtattccgtagtacttacagtagatggtacagaagtgttccgtagcaccgtagaccgcttttcgcaggaagaaaaccgaatgataaactcctggacgtatgggcagtacatgaaatcctttattgatcccggaaatacattacggttgttgaaagcctcgaacgataaccgtggtttggtaacgattgacgaagaacgggattatcagtttcaatatacattgaaagatgcttttggcaatacttcccgctatcactttacggtacgtggcaagaaacagccgattgaaccattgaatcatcgggaaaaatacttctttgcctgggataagacgaattatctgcaggaaccggggttgagtctggttgttccgaagggaatgctatatgataatgtacctcttcaatatcagataaaagcggatagcggagcggtcgcatttacctatcagttgaatgataagccggtcccgctacatgcaagctgtgaattgcgaatcggattgcggcgcaaaccagtggcggacactacgaaatattacgtggcgcgagtgacccctaaagggactaaatacagcgtaggagggaagtacgaagatggatttatgaaagcatctattcgtgaactgggcacatatacggttgctttggacactgttcctccggaaattatacctgttaacaagaacttgtggggacgaaacggaaagattgtctatcggctgaaagatgaaggagcaggtatcgcttcctatcggggaacgattgacggtgaatatgcacttttcggtcgtcccaatattgtaaagtcttactgggaatgtgtgcttgacccgaaacatgtgaagaaaggcggcaagcataccgtagaaatgactgtcacggatgcttgtggaaatcagaccgtttcgaaggaaacctttgtttggtaaactattaaaatgtattatatatgaagaaaagaatcattctatctgctgtcctgtttttggcggctttggcgaattctttcgcttgtacgaacctgattgtcggcaaaaatgcttcgactgacggttcgactattgtttcctattcggccgactcgtatggcctgtttggtgagctttatcattatccggctgctacatatcccaaagggacgatgttgaaagtctatgaatgggatacgggtaagtatttgggcgaaatcgaacaggcacgccagacttataatgtgactggcaatatgaatgaatttcaagtgactatcggtgaaaccaccttcggcggacgtccggaactggcagattctaccggaatcatcgactacggaagtctgatttatatcggattgcaacgttcacgttctgctcgcgaggcgatccgtatcatgactgatttggtacagcaatatggctattatagtggaggggaatcgtttacgattgccgatccgaatgaaatctggattatggaaatgatcggtaaggggccgggggtacgtggtgccgtctgggtggctgtacgtgtaccggatgactgtatttcggctcatgccaatcaatcccgtattcatcagtttgacatgaacgacaaagaaaactgtatcacttctccggatgtgatttccttcgctcgcgagaaaggttacttcaatggagtgaacaaggatttcagctttgctgaggcttatgcgccccttgatttcggtgcccgtcgcttctgcgaagcccgtgtgtggagctatttcaataaatatactgaccatggaaatgactatcttccttatatcgaaggaaagacagatactccgatgcctcttttcgtaaagccgaaccgtaaactttccgtacaggacgtgaaagatatgatgcgtgaccactacgaaggaacaccgcttgatatttccaatgatttcggtgccggtccttataaaaccccgtaccgcctttctccactgaatttcaaggtaggtgataaggagtattttaacgaacgtccgatttcgactcaacaaagtggcttcgtatttgttgcacaaatgcgtgccaacaagccggaccccataggcggagttctttggtttggagtggacgatgcgaatatggccgtatttactcctgtttattgctgtacgacgaaagctccgttatgctatacacgtgtagatggcgcagattacatcactttctcctggaattccgctttctggattttcaactgggtgtctaatatggtctatccacgttatgatctgatgatcggtgacgtgcgtgcaactcagaaagagatggaaacgacctttaataatgcgcaggaaggtattgaagaaatggctgccaaattgctggcaaaagataagaatgccgcaatcgctttcctgactaactatactaatatgaccgcccagagtacttttgatacttggaagcaactgggcactttcctgattgtgaagtacaacgacggagtagtgaagcgcgtgaaggacggacaatttgaacggaattctatcggacagcctgccggtgtcattcgtccgggatatccgaaggagtttctggaggaatatgtgaagcagacaggagagagatatttggtgaaatagttgtcaattattcattaaataactaggatttataaacttattcttttacatttgtgtgctcaagacttggcatatattcaaggattgacagagaatagagaaataatcattaaccaataaacaataatcgaaatggaaaatcaggaacttatcaagcaggtcactgagaaagccgaaaaatggctgaccccggcttatgatgccgaaactcaggctgaagtgaaacgcatgttggagaacgaagataaaaccgaattgatcgaagcattctacaaagatcttgaatttggaacgggtggtttgcgtggtatcatgggagtaggtagcaaccgcatgaatatctatacggtaggtgctgctacacagggcctttccaactatctgaagaagaacttcaaagatctgcctcagatttctgtagtggttggtcacgactgtcgtaacaacagccgtctgttcgctgaaacttcagccaacattttctcagctaatggcatcaaagtatatctgtttgatgatatgcgtccgactccggagatgtctttcgcaatccgtcacctcggttgccagagcggtattatcctgactgcttctcacaatccgaaagaatacaacggttacaaagcatactgggatgatggtgcgcaagtactggctccgcacgatgctggtatcattgatgaagtgaataatatcgcttccgctgctgatatcaagttcaaggggaacccggatctgattcagatcatcggtgaagatattgacaagatttacctcgatatggtgaagacagtttctattgatccggaagctatcgcccgtcataaggatatgaagatcgtttatactccgattcacggtacaggtatgatgttgattccgcgcgctttgaagatgtggggattcgaaaatgtatttactgttcccgaacagatgatcaaagacggtaacttcccgacagtaatatctccgaatccggaaaatgccgaagcgctttctatggctgtcaatctggctaaagaaattgatgccgatcttgtgatggcttccgatccggatgccgaccgtgtaggtatcgcctgcaaggacgacaagggagaatgggtactgatcaacggtaaccagacttgtatgatgtatctttactatattctgactcagtacaaacaattgggtaagatcaagggtaatgagttctgtgtgaagactatcgttactaccgaacttatcaagaagattgctgataagaataacatcgaaatgctcgactgctacaccggattcaagtggatcgcacgtgaaatccgtctgcgtgaaggcaaaaagaaatatatcggtggtggtgaagagagctacggtttccttgccgaagacttcgtacgtgataaagatgccgtatcagcttgctgtctgattgcagaagtagctgcttgggcaaaagataacggtaagtcattgtaccagttgttgctggatatctatgtagaatatggattctccaaagaattcacagtgaacgtagtgaaaccgggcaagagcggtgctgaagaaatcaaagctatgatggaaaacttccgtgctaatcctccgaaagaactgggtggctccaaggtgatcctgagcaaagactataagacgctgaaacagacagatgcagaaggcaaggtgactgaccttgatatgccggaaacatctaatgtgctccagtacttcactgaagacggaagcaaagtttcagttcgcccgtcgggaacagaaccgaagatcaaattctatatggaagtacaaggagaaatgggttgtcgcaactgtttcgcttctgctgatgctgctgcaatggaaaagattgaagcagtaaagaagtcattaggtatttgattccgttcttcttctgatatttcagaatagagaaacaataaataacgcctccatagtctcgaagattatggaggcgtttcttttatgtaaccgccttttcatcggtctttcatttcctttgcattctttaagttcccttgctaatccttcttatggaaatcttgttctatctaaatcatctcaatttaaacatgcaggctacggggatacacggttttgttgatgctttagagtgatacgtaacgtttcattttcataagttgttcgtttgtagtttgtgtgtacttcgtggcctgctttcttcattatttcttagctcccaaccaagtccatttgtgccagatggtttccaatggtccttgtttgtgcttcgacagccaccatttacagaactgtacctgtaataggaaaagaatgattccgataatcagactgagcgtatatccgcaatagggagccagataaaatccgaatgggaagtagatgatagctcccataatagattgtgtgatgtagttagtcagactcatttttccgtaaaagcgcaggttggaaacggttttctggaacttagccttctgataaagtaagatgaaggaggcaatcagtacaatggtgaatgcgaatttctgccacatatcgaaagctgtccctacggtctgttgaatcaggctgctgtcactttgcatgatctgctctttcaaagagtaaagcggagcgaaactgatagctgcaatgatcagtgctttggtccagaatttcagatgagactctgaagtgacgaacagttctttgcgtccgatgtacagaccgaacaggaaaagtccggcagtctgtaagaaacgtccggcaccaatggcccagaacaagctcgctttctgtcctaatgtgacattgccaatgaggaattcccaaaaagttccgtttttggtgtaatctgccacttcgctatacatggctccgacattcagatcgggcagggtataggcaggattgaacagactcattatataatggaaccattcaataggctgtaatgagaataagatagcggtgattaaaatagccttatcgctccatttgcgtacaataaatagtatgataccgacaacaacaaacagaagcaaaacatctccagccggaaagaaagccgcgttaagagtggcaaaaccggcaagtaaaaccagtctccataaaaaacggtagccgaaatcttttcctttcaactgctgattatgcgattggatatagaaagtaaatccgaaaagcaaggcgaatatggcataagattttccggcaaacaatgagaatattgcattaaacactccggcatctaaaacgctaagccattcgggagaactctccggataaacagggaaaatgaaatgttccagattgtgtaccaagaggatggccataactgcaaatcctctgagggcatctactacttcaattcgtggtgtcttttttaataattccatggggctgatttatgattgttttttagttagtattcgttttacccatttattggcgggcttttcgaaataatagtaagaaagtaaactaagtgtaatggtgataccgaaaataaggggaacactgatcatccacgacacctgccattgatagagcgctgccattttcgtatatgtgagtataataaacaaatgtatcaggtagaaactatagctgatttctccacctattatcagaaaccgattggataatagccgggatatacctcccttctgaaaggcaaagatcagtatcatcagagaaacaggtaaccagtaatagcaagaataacggtatactttaggtatatctgcggcacaaagataaaaaagaagaaataaagcgacggatgctacttctgacaatgttcccgtggaataagaaatctttttattatgtaatgcctgatagatctgataaagtaatactcccacaaaaaagtccggcaggcgggtgatgggattgacataccaatatgccttgatttgttcgtcggcagtcagatacatacctgccagcatgaccggaagacagattgagagtataaccaatagttttcgcctgctgtttaagaaaggaatcacgaaaggaaagcagaaataaaataactgttcgcaccccaaactccatgaaggactgttgaaagagaagaaataatcggcagaggggaagaagggttgtaacagaaaggtagaggcgacaaagtgtttgatccagtccgtcgtatcgctatattgaacatatcctcctatacatgcggctattaatagtgtaagtagatgcaggggataaatgcgggcaatgcgtgctacccagaacgtgcgtttagtagtcgtttttgtcagcagtttttcctgataattgtaggcaataataaacccgctgaggacaaaaaagaaactgactccaacaaatccttctttaaagaagtgggcatcgaaacttgtatccagaacatagcaatgtgctccgaataccatcaaggcaaagaatattcgtaaagatgttaatgtgttgatcacgacgtttatctgtttcttttttgtattcggctgtaaaagtacagtttttctgtgatataaaaattcacatagattaaaaagaactcaggattcggagcgcaggcggcttaaatgttgtggagtcatcccaagaaaggaagctatatatcccagttgggcacggtgaattacatccggctgttcgcgtagaagttgttcgtagcgttctttggccggtagatatagtcggtttatgtggtgtatgtccatgtagagcagacattcctgatggataacgcgtccccagttggcaatctcgatatttgtttcataaatctgatttaattcatcaatgcgtatggcatatagtttacaatcttccagtaattctacatattcgtatcccggttggttgtggtataagtctttcatcgcaaaagtgatatcgccttcgcgtgagaaccagatcgtgatttcttcaccgtcacgcaggcaataggagcggcaaaatcctttctcaataaagtagacgtgacgatctgatactccgccgtgtatcagtaagtgtttctttggcaattccagctttttcatgtggctgaaaagcatttccagtgagctgtcagataccggataatatcggcggattcctttgatgatgttctccatgtctgtttatttatgggagcattccagccaccagtcgatcattttccgtgccaggctcaactttcgtggaagttccggcaaattatctcttgtatagaaatcaccggagcttaattcctcttcttgcaatttgatttctcctccggcataatcggcaatgaatcctaccattaatccgctggggtagggccagggctggttgccgaaataagtgatattcttcacgtccagtccggtttcctctttcacttcgcgggctacacattcttccagtgtttcgcctgtttcgaggaatccggctacaaggctgttgaatctgcctttaaagttgcgggcatgaacgagaagtatggagtcgcctttgcgcactaaaacaaggatggctgtcgagatagccggatacacttcacggccacagttcggacagcgtttcatgatagattccttttgttccatcggagtgccgcaagccgagcagaacagactgtttctgtcccaatgcagtatttcgtgggctttgcctgctgcctgataatgtcccagcggaaggtattcgtaagaagcgcgaagccctatcattgcatattgctctgtctcttcaataggttgggatacggaataagctttgcagtttcttccttccagtgtggtgatattgtgtactgtagtcttgtctttgatcaggataggaggaatttctccgcagggaatggcaaatgtaccgttcccctccttttcaagtagtagttcgtctttgtaaaagacaaaccacagggattcagctgtttgattcattttatatttttctattttcttcgcgctgcgaagttataaaaactgtatcgatatatgtagggtttaccggataaaatatgaatagattaacttaaaaatatactttgttccactccaatctcctgaatgaaataattatcgtgtgagatggctatcacagtacctgcatagtttttgatggtagcagtaataatttcgatgctttgtatatccaggttattggtcggttcgtccagtataaacatatcgggcatattattactgatcatcaggcaacaaaaggcaagtctcattttctctccgccgcttagcttccggcaagatttatcccattcggaagccggaaataaatatcggttcagaataatctttatttcgtgctccggcaggttgcggccattgaaggcataggcttgttccaaaatactgtttcgatcattgatgatcgaatattcctgattcagatatacataggtgaaatttgcctgtatgagcgtgcctttcagtggttgaagttgtccggttatgattttcagcagagttgtttttccgctgccgttgcctccttctatacgaaggcggtccccgcttttcagctggaagctgagaggagcttgccaaagttgtggctgatcgggatgataaccgaagttaatctcctctgccgtaaccagtattttaccggtatgaagtccggaattgttaaagtcagtctttagtgcagctgtcggcgagagtgaacttcggagttggttacgctcgtcagttaacttctcggctttctcctgatgggcaccggttagtttggcagtgctcttttccgatttgctttgcaaaccgttcagtacaatacgcggaacaccttttttcaggtttcttttttcaccacgtacattctgtttatccctccgttcagctgtttcgcgggctaccttgcgggcggtgcggagcgctttttctttttcttcgatgcgttgttgcagggcttcttgcatcagtgttttttgttctttgtaaaattcatagtttccaccgtaatagctgatctgatgcttttccagttcacatatttcgggaagaagattcagcagtgtacggtcatggcttactaccaacagcgtggaacgccatttttccacccagtcatacagacgttgtctgcctgacgaatcgagatgattggtcggttcatccatcagtatgacggatggattatgaatgtccatacctgcgaggaatacgcgtgtcttttctcctccgctgagcagattcattgggtaggatagtgggaattggcccaatccccacgaatcgagggcggcgacggaacgttcttctatattccagtcgtcgttcaatatgctgaaattttcgattgaggcatctcccgcaaggatagcatgtagtgctttctgcttatggtctatctgtaaggcttgcgcgatggtcaacgaatcatattgcccgaaatgttggggaatataatagaggtcgtccggtcggacgatgacgccggaagagggtgctaattgtccggcaataatttgcagcagggtagatttgccacagccgttgttgccgactaatcctaacttctgccctttactgatggcaaagttaaggtcactgaataatacttctttatccggatggatatagctgatttgttgaatattaataggcatgatggtctattgggtttgaggttgaaaactgggtgaggataatcacgggacaagggaacgacaaacacaatactggctaaacaacacgaatttcgtgatgcttaacgataaagaaaaagcatggatgaaaagtgatgtttactagaagtgttgtcttacttagaaattctcattgtggtaagtatatagtttaacttgggtgcaaagatagtactttcttttatatatcaccgttttttagctaaaaaagatgtatttcagaggttctgttcggttgaatcagaggctttgtttagtccattcagaggctctgtttactcgattcagaggctctgttttgagtctgttttaaatgatagatatgagtatttgattcatttgagtgtttaatgccggtctttcttgtttttcttgcataaatcattttccccagtcgtacatctaagtattactcaaatgtgcgactggggataactgttattgccataaaaataggctcagattagtggaaagacataataaggttattaacgtattcctgcacgttttagtccctccctttacattatacgtcaaataattgattcaacccctcgctcatactcggatgtgtgaagatgaagtcacgcaggaacgtagaagtctgtcccgtcttcatagccattgcaaccatattgatcagttccggagcatcggtacagaacatggtacatcccataatcttaccgctatggctattgataatagcctttagcatcccatcagtctgttgcaaggtacgcgaacggacaacggaggttgccggcagtcgggagactttaaaagaatacccttttctcagtgcctcctcttccgtaattccgatatgtgccaatggcggatcgataaatacagcataaggcagaggatccctgtcgttgatgtcacgtttcttgtccccgaaaagctgatcccggataatacgaaaatcatccagtgagacataggtaaattgcgctcctccttttacatctcccattgcccatatatgaggggcattggtatgtaattggtcattgactacaattgccccgtgcgcatcgacttctacaccggctgcttgcaggttcagtccttcaatcattggtttgcggcctgtggcaataaggatcgcatcaccgtctacaaagtaaggagtgccgtccgaagtatccgaataagtcagagttaccccgtcgtgcgtatcatggatcgattgagtacggacattcagacgaatctcgactcctttcttctccatcacttcccgaacgcttttcgcaatatccgaatcattgcggggcatgaatctgtttcctgcttcgagaagagtcactttacttccgaagccggcgtacatcgaagcaaactccagtccgatatagcctccgcctacaataatcaggtgctttggcagaatatccaattccagaagagtggtactggtgtacacatttcgactttgctgaataccctctatactgggaataataggtgtagagccggtattgataaaaatctcttttccctgcagttcgatttcttcttcgggaagagcaaccttcaccgtattggctgaaacgagagaccctttacctgtgtaaatagtcacattagggcgtttgcttaatttctcgtagttattttctcttaaaaaagaggtaagtttgttttttctggcaatcgcctgcctatacatgttactctgcttatcaaaatcattgtgataaagcagggtggaaatctctgattcgtgaatcaaagttttggttggtatacaggctacgttagggcaagcccctccgtacatttcatcggactgttcgactacagcgacctgccatcctctgttggaaagttcggcagccagtgtttttcctgccttgccgaaccctataataattgcatcatattgtttcataacttcctttcattaacgatttatactcagctattataacacatgaagagtatatttgttttgcgtcatatccgggaagcaaaggtgtccgtagcggacagaatcagctttttttcagtgttttgagtacgcgttgtgacgaatctgaaagaagcactacggctcctgcgagaataacgatatctttgataaccagtcttccggcaccggacaataacgggaagccaaattcatctccacccagattcggaacccagacttcgggcgtggtgacaaggaaggatagtgtacccaacgtcataatgatggcgagcgtatcacctaccagcgctactttcgggaagaaaatgcccaggaataccagaataccgatactcatgatgagcgctcctaatccataggagaaagtataagtgcgattggcttcgtgccaggcgcggttttccggaacgaaggctccttccggatttttgtggtctttgtattcaggagcatcttttgcatagaagaagctcatgaagggactgttggctacaaaaggaacaattccgtcggcttcgtagtggaaatatttcagtccaccgatccatacgaatacgactaagatagctacacggataaacttaattccgaaattcttcaagctggaagtgaaggtaagcaaagcaataaatttctctttcattttgcggtctttttatgggtttaactttataccgcaaaggtcgtgctttctgcatacctccgaaatggcaatacttccgcttcacttatcaattcttcccaacttccgtatttctgaactgtacggcactctgtcctgtcatgtttttgaaaaaacggctgaaagaagcctggtcttcaaatcccagaatatcggcaatttctttcgcgctcttattgctgtagagcaggaggcgtttggcttccgcttccacccgttcgtggatgacccttagcggagaaggcaacttacatgttgagaaaatgttcgaaagtgtcttcggtgacttgtgaagcatatcggcatagtcctgtacctgttttttggtccggtaatgctcgtctaccagattgtaatactggcggacaatctcgaagccggattccttttcgcgcgtgatatccagtcgctgacgggcgattcgggtgcattggatgatgaaacgcttcagcaggatacgcagcatttcttcctgcaggctgtcggaaacggtgaactcgttttccatggcttcggtaatctggtccagttgccggcgctctgcttcgtttagtgtgaagcggacaaggtgggacgaaccgttgaaaaggaagccgctgcacgacacttcgtggtcgtttccatagatacaatagaagttgctgttgaacagcaaagtcatatattcaccatctatggacttaaattcaagatgctgcagatgagtcagtgagataacgtcgtcttttgaaagtaccatctcttgatggtcgatttctactgtaatgcttccttggcggacccatataaacttatagagtcctttttctttttgcaaagctttctctgtcagataagaatctgtgagagcgagtgttccttttagtttggtgtgatactgttgtaacataatttattcctccatggctgatgcgtcaaatgacagcggtagtaaatcgccgatactttttacttcgtagatacattctctgccgtatagcagaatacggataggctggccgtaacgtttttccgtttccagaatcacttggcggcaggcgccacaaggaggaataggagtttctataaagtccttttcggtttttgctgcgatagcgagggtatttaccggttggtcgggatactgcgagttggcatagaacagggtagtacgttccgcacaaagtcccgacgggtaagctgcgttctcctgattggttcccgtcacaatggttccgttgttcagcagtgcggcggcgccaactgagaaatgcgaataaggagcatagctgcgggcggttgcttccatggctgttttcattaatgaccggtcagcttcgttcagttcatcgtattgatatactttgattatagcggtaattgtgaggtccttcatatcggtaaataggttagttctacattattaatgttacaaagttagaaaagagattgataatcccaattatttttcagatttttgtgtccgataatccacatataagttaaaatggagaacaaattgtatagactagtctttctaactgccattatcttctttgccgtaggagtacaggcacaaagacggaatgcacgttatgtagaatatataaataagtatagtgacttggctgtggagcagatgaagcttcacaaaattcccgcaagcatcactctggcacagggattgcttgaaagcggagccggaaacagccagttggcacgcaagagtaataatcatttcggtattaagtgtggcggcagttggcgcggacgttcggtacgtcatgatgacgatgcccgcaatgaatgtttccgtgcctacaagcatccccgcgaatcgtacgaagaccattccgactttctgaaaaggggtgcccgttatgccttccttttcaaactcgatatcaccgattacaaaggatgggcacgcggattaaaaaaggcaggatacgccacagacccttcctatgccaatcgactgattacgattatcgaagattacgacctgtataaatatgacagcaaaggtgtctactcggaacgtaagttgcgaaagaacccttggctgctgagtccgcatccggtgtatatcgccaatgatatcgcctatatcgtagcccgtagtggggatactttcaaggatttaggtaaggaatttgatatcagctggaagaaactggtgaagtataacgacttgcagcgtgattatactttggtgaacggagatatcatctatctgaagagtaaaaagaagaaagcatccaagcctcatactgtatatattgtgaaagacggcgattctatgcatgccatctcgcagaaatatggtatccgtctcaagaatctgtacaagatgaatcgtaaggacggagaatatattccggaggtaggagatcgtttgcgtctgcgttagaaaactttatgccatactcatgtgttattatgtatgataaaacatgattaatatatgagtctaaatattgcaaaggacagtaagaaacgggtcgtcattgtaggcggtggtttcggtggcttgaagttggctaataagctgaaaaaatcaggctttcaagttgtgttgatagataagaacaactatcatcagttccctccgttaatttatcaggtggcctcggcaggtatggaaccgacttccatttccttccccttccgcaagatattccagcatcggaaagatttttatttccgtatggcggaagtacgtgctgttttccccgaaaagaacatgatacagacctccatagggaaggcggaatacgactatctggttcttgctgcaggtacgacgaccaatttcttcggtaataaacatatcgaagaggaggccatgccaatgaaaaacgtgtccgaagctatggggctcagaaatgcgcttctcgccaacttggagcgtgctgtgacctgctccaacaaacaggaacagcaggagttgctgaatatcgttgttgtaggtggtggtgccacaggagtggaagtggcgggagtactttcggaaatgaagaaatttgtattgccgaatgattatcccgatatgcccagcagtctgatgcatatttatctgatagaagcggggccgcggctacttgccggaatgtccgaagactcatctagtcatgcagaacagttcctccgtgaaatgggagtcaacattcttttaaataagcgtgtcacggattaccgtgaccataaggtgacacttgaagacggcagtgagattgctacccgtacttttatttgggtaagtggagtgaccggagtttcttttgggaatatgaatacgtccgtaatcggtcgtggaggccgtatcaaagtagatgccttcaatcgggtagaaggaacgaataatgtgtttgccattggtgacttatgtattctttccggtgacgaagattatccgaacggacatcctcaactggcacaagttgccatccaacaaggggaattgctggcaaagaatctgatccgcctggaaaaaggaaaagagatgaagccttttcattatcgtaacttggggtcgatggcgactgtcgggcgtaatcgtgccgtagcggaattcagcaaggtgaagatgcagggatggtttgcttgggtaatgtggctggtagtgcatctgcgctctattctgggagtacgcaataaagtagtggtgttgttgaactgggtatggaattacttcacctatgatcagtccatgagaatgattgtctatgcccgcaaggcgaaagagatccgtgaccgggaagcaattgaggcaactacccattgggggaaagacctcatacaggagccacaaccggccaaacaagaaccgcaaccaaactcaaaagaaatagtatagcaccgttttgcgatggtgtcactatccggtcggtatagtgacactattacaaggagatagtgacactataacaacagtatagtgacaccatgtttttttgaacggtaaattcgtacaaggtgtccgatatcggacaccttctcttttttattattctctgttaatcagttgattatgcttttggcatagatttggtataataaagggtaaaacaactgaaagtgaaattgtaaatacttagatatggacagagaaatacccaaagaagtgcgtaacaaagaacgcaataaaaagatcatccgttattcatcgataggagtggccggtatagttgttatcggcatacttatatctgtcatgcggacaggagtggaaaaaaaggatctggtactttctacagttgataagggaatgattgaagttagtgtcagcgcctccggtaaggtagtccctgcatttgaagaaatcatcaattctcccattaacagtcgtatcgttgaggtatacagaaaaggaggggatagtgtggaaatcggcactccgattctgaaactcgaccttcagagcacggaaacggaatataaaaaactgcttgacgaagaacagatgcgccgctataagctggatcagcttcgcgtcaataatcagacgaaactttccgatatggcgatgcagattaaggtctctgccatgaaattgagccgcatgaaagtggaacttcggaacgaacactatctggacagtctgggagcgggaacaacagataaagtgcgtcaggcagaattgagctataacgtagcacaactggaatacgaacagctccaacaacaatataagaacgaaaaagaagtagcggctgccgaactgaaagtgcaggaactggatttcaatatcttccgtaaaagtcttgccgaaatgaagcgtacactggacgatgcccagattcggtctccgcgtaaagcgattcttacctacattaataatcagatcggtgctcagatttcgcaaggcggacaggtggccatcatctcagacttaagtcattttaaggtagaaggtgaaatagccgatacctacggtgaccgggtagctgccggaggaaaagcggttgtaaagataggcaatgacaaactggaaggaacggtcagcagtgtgacacccctgtctaaaaacggagtcatttcttttacagtgcagttgaaagacgataataaccaccgtttacgttcgggactgaaaacggacgtttatgtgatgaatgccgtaaaggaagatgtgatgcggatggcaaacgcttctttctatgtgggacgtggtgagtatgatctttttgtccggacatctgatgacgaactggtgaaacgtaaagtacagctgggcgattccaactttgaatatgtggaagtggtgagtggcttacaaccgggagatgtagtggtagtcagtgatatgagctcttataagaacaagaataagctgaaaatgagataaaaacgatctaaattaaatacttatagttatgataacattgacttctctctctaagatttaccgtacggacgagattgaaacggtagcactggaaaacgtgaatctgaccgtagaccgcggagaatttctaagcattatggggccgtccggatgtggcaaatctactttgttgaatattatgggactgcttgatgcacccacaacaggaactgttgaaattaacggtacgcacactgagggaatgaaagataagcaactggcggctttccgtaacaaaacactgggctttgtattccagtctttccatctgattaattcactcaatgtgatggataacgttgagttaccattactctatcgtcgtatcggcagcggtgaacgcaagcgtttggcgaaggaggtactggaaaaagtcggattgagtcatcgtatgaatcactttccgacgcagctttccggtggtcagtgtcagcgtgtggccatagcgcgtgcaattatcggtcatccggagataattctggccgatgaacctaccggtaacctggattctaagatgggtgccgaagtcatggaacttctccatcggctgaataaggaagacggccgaactatcgttatggtgacgcataatgaagaacaggcgaaacagacttcaagaactatccgtttcttcgatggccgtcaggtacagtaatccccttttaaactctaaaaaagctaatcatgacaaagaatatttttataactgctgttgcggtattattaagtgtagccctttgcccgctttgggcacaaaatgtgagtgaagattgtaaagtaggcgaattttccgctatcaatctgcggtcggtaggtaacattattttcactcagtccgatacttattcctgtcggatggaaggtccttttgaatatgtcgataaaacaaaagtaacggtaaaaggagaaacattggttatcgaatataagcagaagaatgtaaaaaacgttaagaacctgacgttctatatcacagcccctgatttgaagagtgtaaagatcgatggtgtcggcaacttcaatgctaaagaaaccctgaaactgaaaaatgtaactttcaaactcgatggagtgggaaactgtgaggtgaaaaagctccattgtgatgagttggaattaatggtagacggggtcgggaatatgaatgtcaatgtaaactgcaatactgtgaaagccaaagtggatggagtcggaaatatcaaattgtccggcaaggcagacagagcttctctgaagcgtgacggagtaggcagaatcaatcataaaggcctgaaatgcccggatgtgagcacgaaaggctggggattctgataagtatgaaaatgaatgagaagataatgagattacaatgataaaactctatttcaaacaagcatttcacctgttgaaggagaataagttactttcttctatctctatcataggtacggcattggctattgctatgattatggtgattgtgatcacattgcgtgctactattgcaccctttgctccggaaagctatcgtgaccgtatgttgattttcaggtatgcgggatttcagtataaaacaaacgagaactggcagagtaacggacctgtttcttataagacagcgaaagcctgttttaaagaaatggctgcccctgaagcagttactataaccagcagtttctcggaaacgatgctggctgccaagccagcgggagagaaggttagttgcagtgtattgcaggtggatgatgatttctggaaagtatttaagttcgatttcctttcgggatatccgtttgataaggctacttttgatgccggtgcaaccaaagcagtaatatctgaggatatagcccggcaattgttcggaacatcggatgtagtcggaaaaacattccttttaaatcactccgcttatatgatttgtggagttgtgcgtcccgtatccaaactggcacggtatgcttatgcccagatttggattcctttaagttcaacagatgcgtttaccgccagttggggtgaatatggaattatgggaatggtgagtgtctacattctggctaaatctcaggatgactttccggcaatccgtatggaagctgaacgtctcagggacagatatatggaaggttatccggattatgaattgctttatcgtgaccagccggatacttattttgtggcggcacaacgatattcagccaataatcctccggctgtgaagcaggctgtccgtcagtatataataacgttaatcattctgttgatcgtacctgctgtcaacctttccggactgacattgtcgcgtatgcgcaaacgcctttctgaaatcggtgttcgaaaagctttcggtgcgcccagacgcgaactgatgatacaggtactttctgagaatatgctttattcactgttgggtggagtgctcggattaattctgagttatggcgcaactttctttttgggaagtatgctgttttccattgactttatgggtaatggtgtgacggatttgcggaccatgtgtatggatctgctgtttgacccggttgtgttcttgctcgcattttttgcctgctttgcacttaatttattgagtgctgccattccggcatggagagtgacacggacaaatattgtggatgccatcaatgagagataaccgaaacattcaacaaactaatttttaagaagatgcaactgttaaaacaaatatggaacgaacgtcgctcgaacgggtggttgtgggcagaattgctgattgttttcgtggtgttgtggtatattgtcgattggacgtatgcaacagcgcgtacttattacgaaccgctgggatatgacatcaccaatacttactatctggaactcagtctgaaaaacaataagagtgattcttatattccgaaagggcagaaggaaacgacgacgggacaggacattgttgaactgactaaccgactccgtcgcttgccggaagtagaggctgtctcgatatcagtgaatgcacgtccgtatataggaagtaattccggcatccgttttcgccttgatacgctggtgcgcagtccgttgagacgtccggtaacaccggagttttttcaggtgttccgttatcaaagtgcggatggacagggatatcagcctttaatgcaggctataaaaaacggaaatgcggttctcagcgagaatatatggcctgacggttataagggtgaccgtacgttgttgggaaaagaagtcgtgaatgtggatgattctacagacgtttataaaatagctgccgtatcgactaaggtacgttacaatgatttttggccaaattacagcgatcgctatatggctattcctcttacggaagcacaattggccgagattaatgatgacctgtatccgctcaatacggaagtttgcctgcgtgtaaagccgaatacggctcccggctttccggagcgtctgatggaacagtcggatacccagttcagtgtgggaaatctttttatactgaaggtacacgattacgagatgatacgtgaggattataatcgtaccaatgtcaatcagatgcagacgcggttttggatgatgggctttttgttggtgaatatcctgttgggaatagtcggtacattctggtttcgtacccagcatcgtcgtggagaactcggacttcgtgtcgcagtcggttccacccgcatgggactctggcatcgtcttaataaagaaggcttgttgctactggcactggctgctttgcctgctgcaattatttgttataatataggttatctggaactgacggaaggtggtatagagtggagtatcattcgttttcttatcactttttgtgtgacaagtcttttgatggctttgatgatactcataggcatttggttccccgcccggcaggcgatccgtatacagccggcagaagccttacgcgaggaataaaaaactgaagctatttgcattgttttcaatataataacttatctttgtaggcaaaatgttgaaaacaatgctgttttttgcttatgaaccgacaatattactgtttgtttgttgttttgttcttcgttgtttttgcccgggcggcggcagcagaacatacatacaatatactttttatccaatcgtatacctcacaaaccccttggcataacgacctgaatgaggggctgaccaagggattcaaagagaatggactgaaagtaaatattactactgaatatttggatgccgatttttggtcattcagttcggagaaagtgattatgcagcgtttttgtcagcgtgcccgtgacagaaagacggatatgattatcacagccagcgatgaggctttttacactcttttctcttccggcgattcgttgccttaccaggttccggttgtgtttttcggaatcaaatatcccgataaagaacttatagcgagtcttcccaatgtatgcggattcaccgctaatcccgatttttatgtgatcttaaagcaggcacaaaaggtatttccccaacggaaagaagtgatatgtgtgattgacaacagttttctgagtaataagggacgtgaggacttcaaacaagaatggcagctttttcaggaagagaatccggattacaagatgaaactctacaatacccagcatgaatcaaccaatcatattattgcggctatctgttatccccgtaatagttatgctcgggttgtggttgctcccaaatggtcaccgttcctttcgtttgtaggcaagaactccaaagcaccggtcttctccagtcagaatgtggggctgatgaacggtgtatttgcggcatatgacgcagacgcctatacctctgcgatgtctgctgcaaagaaggcatcgcgagtgttgaagggggaatctcccttgaaactgggtgtgacggagacggaacagggatttatttacgattataaacagctggacttctttcatatagacccggataaggtttcctccagtggcagtgttgttaatcagccgtattgggaaagatataaattattgtttattcttctttatccatctatcctggcattgttgatcgtctctatcgtgtggctcattcgtgtcaaccgtcgtgaagctaagcgacggatacatgcccagacccgcttgttggtgcagaataaactggtggaacagcggaatgagtttgataatatcttccattccatacgcgacggtgtgatcacatatgatactgatcttcatattcactttaccaaccgttctctgctgaagatccttcatttaccctcagaatcgggcggacggaattatgaaggaatgatggcgggcagtattttcaaaatatactataacggtcaggatatcctttacaagatattgaagaaggtgggagagactgggcagagtgtcattattcccgatggggcttttatgaaagaagtacatagcgaacattatttcccggtttccggggaagttgttccgattcattcaggcgggcagattaccggtatggcactttcggcacgcaacgtatcggatgaagaaatgcagaaacgtttctttgacatggccgtggaggaaagttctatttacccttggcagtttgatgtggagagtaatagtttcatctttccgcaaggttttcttgttcgttttggttatgatgagtcgattacttccatcacccgcgacgaaatggatcgtatggtttatccggaggatttgaaggaaatgcgtattctctttgataaaacattggcgggaaaagaaaccaatacccgtttgaatttccgtcagcgcaatgccaatggagaatatgaatggtgggaataccgttcctctgttatttccggtttgacgagagattcgctatataatatattaggtgtatgccaaagtatccaacgttataagacagcagaacaggaaatgagggaggcgcgtgataaggcacttcaggctgacaaactgaaatctgctttccttgccaatatgagtcatgaaatccgtacaccactgaatgctattgtcggtttctccgacttgttgagcgatacaagcggctttacagaagaggaaatagggcaatttatagcaacgatcaataagaattgcggattgttacttgcattgattaatgatattctcgatctgtcgcgtatcgagtcaggaacaatggaatttatgtttgccaatcataatttgcctctgctgctgaagacagtgcatgattctcaacaactgaatatgcctccgagagtggaactgttgcttcgtatgcccgataatgagaaaaaatacctggtgacagataatgtccgtctccaacaagtcgtcaataatctgatcaataatgctgccaagtttacgacttacggttccattactttcggatatgaggaagatgaagatcccgaatatacccgaatctttgtggaagatacgggagtcggcatttccgaagaaggtatccgtcatatcttcgaacgattctataaggtggacaactttacacagggagccggtcttggattgagtatctgccagacgattgtcgaacgtctgagaggaacgatctttgtgacttccgaagtaggcaggggaactcgctttactgtacgtatcccgaatttctgcgaataagactgaacgttcatttctgtgcatagtgtccgaaaatgaacactgatacatttctctaaccgattgatagtaaatgtattattcttttggcacatggtttgattctatctgactggaaaataccgtgtacaatgaaaaagaaaagtatattgtttgttctggctgcaatctgtctgcctttggcagtgtcggcacagaaagagagggaaatcaccttgaacgaagctatcgctatggcgcgtatgcagtctgttgacgctgccgttgccttgaatgagttgaaaacatcttattgggaatatcgcacattccgtgccgatcttcttccggaaatcaatctgaaaggaacactgcctaattacaataaatcttacggctcctatcagaatccggacggttcttacagctttgtccgcaacagcgccttaggtctttccggtgaactttccatcgaccagaatatctggcttaccggtggacaactttcactaacgtcttcccttgactacctaaagcaactgggtaatagcggtgatcgccatctgatgtccgttcctgttactttaaaactgacccaacctattcttggtgtgaataatgtgaagtggaacaggcgtatagaacctgtgcgatatgccgaagcgaaggcggaatttatcacagctaccgaagaagtgacgatgcgggctattacctattactttgatctgctgttggcgaaggagactcttggaaccgcccgtcagaacttgacgaatgccaatcagctttacgaagtggctatagctaaacgcaagatgggacagatttcggaaaatgaacttctccagttaaaactttcggcattgaatgcaaaggctgcgttgaccgaagccgaaagtgatctgaatgccaagatgttccagcttcgtgcctttctgggagtgggagaggatgaaatcctccgtcctgtcgttcccgagtcggtagattgtggtaaaatggaatataatatggttttgaataaagcgctggaacgtaattcttttgcccagaatattcgtcgccgtcagttggaggccgattatgcggtagctacggcacgtggtaatctgcgtagcattaatttgtttgccagtgtaggatatacgggagagagtcgtgaactttccagtgtctacaggaacttgcaggataatcagattgtgcaggtaggcgttcagattccgattctggactggggaaagagacgcggaaaggtacgggtagcgaaaagcaatcgggatgtagtactttcgaagatacggcaggaacagatcaacttcaaccaggacatattcttgctggtagagcatttcaataatcaggcacagcaattggagatagccaaagaggcggatggcatagctcagcaacgttacaaaaccagtattgaaaccttcctgattggtaaaatcaatacactggatttgaatgatgcccagaacgccaaagacgaggcacgccggaaacacatctccgaactttattattactggtattacttttatcagatccgtagtctgactctctgggatttccaggctaacacggagttggaagcagattttgatgaaatagtgcgacaatagggattaatcgggctatttgttgcttgtattgagtatttacaatatctttgtcacaagtaatttaaactatgattttaataatagacgacgacagtgcggtacgctcttcactcagttttatgttgaagcgggctggatatgaagcacaaacggtttccggtccccgggaagctatggaggtggtgcgttccgtagcaccggatttaatcttaatggatatgaacttcaccctttctactacaggtgaagaagggctgactttgctcaggcaagtgaaaatattccgtccggaaactccggtgatactgatgaccgcctggggaagcatacagcttgccgtgcaaggtatgcaggcaggagccttcgattttatcaccaaaccttggaataatgcggcattgttgcaacgtatcgagacggctttggaactggcaggctctcccaaagagacaacgcaggaacagaatgacgctttcgaccgtcgtcatatcatcggccgtagtcagggactgacggaagtactgaacaccattgcccgtatagcaaagacgaatgcttccgtactgatcaccggagaaagtgggacgggcaaggaactgatagccgaagcgatacacatcaacagccagcgtgccaaacagccttttgtcaaggtgaacttgggaggaatctcccaaagtctgttcgaaagtgaaatgttcggccataagaaaggagcttttacggatgcttcctccgaccgtatcggacgctttgagatggcgaataaaggaaccatctttctggacgagatcggtgatctcgatccttcctgtcaagtgaagctcttgcgggtgttacaagatcagacgtttgaagtattgggagacagccgtccccgtaagacggatattcgtgtcgtctctgctaccaatgccgatttgcgtaagatggtgggcgaacgtactttccgcgaagatttgttttatcgtattaatctgattaccgtcagactgccggctttgcgtgagcgtcgggaggatattcccttgctggcacgtcactttgccgatcgtcaggcagaggccaacggttttcctcgcaccgaattttcggcggatgccttgcagtttctgagtcgcttaccttatccgggaaatattcgtgaattgaagaatctggtagaacgtacgattctggtcaatggaaagccgacgcttgatgccgccgactttgatgctcagtatatccgtcacgaagatcagaaagtcgccgaaggcgcatcctttgctggtatgactctggatgaaatagaacggcagacgattttgcaggctttggagcgtcataagggaaatctgagtcaggtagctacagcgcttggcatcagtcgtgccgccctttaccgtcgtctggagaagtttggaatcagtgtttagcagatagatgttactattattatgcgtataaaaggattctttggtatactcgttttcctgcttctggtcttggggggtggattgcttttcctttcaagccggttgaatatgatctatttctatataggagaggggttggtcctttttatcctgtgttatctcccgtttttctatcgtaagattgtgaaaccgctgaactctatcggaagcggtatggaactgttgcgcgaacaggatttcagcagccggttaagtcccgtggggcaatatgaagctgaccgtatcgtgaacgtcttcaaccggatgatggagcaactaaagaatgaacgtctccgtctccgcgaacagaataacttccttgacctgctgattaaagcctctccgatgggagtcatcctcaccacattggacgaggacctttccgagctgaacccgatggcgcagaaaatgctgggtgtccgtcaggaagatgttctgggtaaaaagatgaacgagatagattctccgcttgccgccgagttggcaaacgtaccgaaaggagaaacggctaccgtccgtctgaatgattcgaatatttataggtgtacgcattcctcttttattgaccgtggatttcagcaccccttcttcctgatagaaagtctgacggacgaagtgatgaaggcagagaagaaagcctacgagaaagtaatccgcatgattgcccacgaagtgaacaacactactgccggaataacctccacactggatacggtagaacaggcgctttctaccgaagaaggcatggatgatatttgcgatgtcatgcgtgtatgtaccgaacgctgtttctctatgagccgtttcatcacccgttttgccgatgtagtgaagattcccgaaccgacgctcacgcttgtcgacctgaatgacctcgcatttacatgcaaacgttttatggaaggtatgtgtaccgaccggaacataaaacttcgtctggagatagacgaaacgctgaaagaggtaaaaatggatgcctccctcttcgaacaggtattggtaaacatcatcaagaatgctgcggaaagcatcgagaaggatggagagattatcgtccgcaccctttctcctgccattgtcgaagtggtggacaacggcaagggaatcagcaaagaggtggaagcgaagctgttcagcccgttcttctccaccaagcccaatggtcagggaatcggactgatctttatccgggaggttctgatgcgtcacggctgtaccttctctctgcggacttatgccgacggattgaccagattccgtattctttttccctgatcaaatgtcaaacgagaacagttcttccgctatatagacctttttttgttctgaaatccctcctacctttgccccgctcaattcaataggatgttaaggtataagatatgagattaataattaaaggtgcagtagcgctctttcttttattggctatcagtattccgctaagtgcccaatacatagtgcagggtgtggtgactgattctctgaccagagaacccttatcttatgtatctgtacgtctgaaaaacacgaccgaaggaacgactaccggaagtgacggacgcttttatttcaaaactcatcgctccgaaggagtgcttgtgatctcaaccgtaggctataatgaatatagccggctgatccatccggcacgtaatctttcgtataaagtagcactttctcccgctacatacgcgctcaacgaagtattggtgaagcctaaacgcgagcattaccgtaagaaagacaatcccgctgtggagtttgtccgtcggatgatagaacaccgtgacgaccattctcctaatgagaaagacttctggcagcgcgaccgttatgagaagactacctttgcgctgaacaacttcgacgaagagaaacagaagaaatggctataccgcaaatttgatttcctgacagaatatgtagacacctctgccgtcaccggaaaaccgatactgaccgtctctgcccgtgaacttcttgctacggactactaccgcaaatctcctcattccgaaaagcagtgggtgaagggacgcaagcaggcaggagtcgatgagttcctttccaaacaaggtatgcaggctgctattaatgaagtctttaaagacgtggacatttacgagaacaacatctccctgttcaccaataagttcgtcagccccttatcccgcatcgggacaggattctacaaatattatctgatggataccttgcagatcggcggtgaaacctgtgcggaccttgctttcactccctttaattccgaatctttcggttttaacgggcacttgtatgtcacgctcgactctacctactttgtcaaacgtgccgtgcttaacttcccgaagaagatcaatctgaactttgtcgattatatgctgcttgaacaggaatttaagcgggcagaagacggtacccgtctgctcgaccatgaaagtatcaccgtagaattcaaactgaccgaagggcaggatggtatctttgcccgtcgggtggcggattacagtcgttattctttccttccgaccgaggaagccgataaagccttcaccaaaccggaacgtatcatcgaagaaaccgaagcgctgtcccgacccgaaaccttctgggcggagaaccgtccgcaagcagccatctcgcaacaggagaactccgtagaccgcctgatggcgcaactgcgtggctatccggtctattattggacggaaaaggtgctgtccattctcttcaccggatacatcccgacctccaaagaagcccctcttttctatatcggtcccatgaatgccaccatcagcgggaatacgctggaaggaccgcgtatccgtgccggtggaatgacgaccgcatggctcaaccctcatctgttcggcaaaggctatatcgcttatggcttcaaagacgaaaggctgaaaggactggcggaagtagaatactctttcaagaagaaaaaggaatatgccaatgaatttcccatccattcactgaaagtacgttatgaatcggacgttaatcaatacggacaaaactatctgtacacaagcaaagacaatgtcttccttgccttgaagcgtgagaaggatgatcgtatcggctattaccggcaagcggaaatgacctataccaatgagttttattccggtttctccttccagctaacggcacgcaggcgaacggatgaatcgagctacctgattccttttctgcggaaagacggtgaggtttactctccggttaaagacttctctaccagtgcggcggagttgaagctgcgctatgccccgaacgagaaattctttcagacacaatggaaccgcttccctgtatcgctggatgctccggtgtttacactgtcgcacaccattgccggaaaaggagtactgggaagtgattacacctataatcataccgaagcgggtatacagaaacgtttctggttttctgctttcggctatacggatattatcctgaaagcagggaaggtatgggataaagttccctttccgttgctcattatgccgaatgcgaacctttcctacaccattcagccggaatcctattcgttaatgaatgctatggagtttatgaatgatgaatacttttcgtgggacgtcacctatttcctcaacgggtggttgttcaatcgtatcccattgttgaaaaaactgaaatggagggaaatagtttcctttcgtggactttatgggcatttgagtgataagaataatccggatatgacagacggtttgttcgcttttccgatagcaagtacccgtacaatgggaaaaacaccttacgtggaggcgggtgtgggtattgaaaacattttcaaggtattacgtttagactacgtctggcggctcacatatagggattcgcccgatattgacaagtccggcctgaggataagtcttcacatgaccttctaaaagttaaatcctgctaattgcaatgtttatatagcaaacaaaggtcgctttagtaattaattaatcttatttttgcatcaattttagtttaattttaatagaatagaaatgaaacaagaaattaaacccgctactggacgtcttggcgtgttggtagttggagtaggtggtgcggttgccaccacaatgattgtaggtacactagcctctcgcaagggactggcaaaaccgataggatctattacacagttagccacaatgcgcatggaaaacaacgaagaaaaactcatcaaggacgttgtgcccttgactgatttgaacgacattgttttcggtggatgggatattttcccggacaacgcatatgaagctgctatgtatgccgaggttttgaaagaaaaagacctgaacggtgtgaaagatgaactggaagctatcaagccgatgcctgcagctttcgatcacaactgggcaaaacgtctgaatggtacacatatcaagaaggctgctacccgttgggaaatggtagaacaactccgtcaggacatccgcgactttaaggctgccaacaactgcgaacgcgttgttgtactgtgggctgcaagtaccgaaatctacattccgttatcagacgaacacatgtcactcgctgctttggagaaagcaatgaaagataacaacacagaagttatctctccgagtatgtgttatgcatacgctgctatcgcagaagatgctccgtttgtgatgggtgctcctaacttgtgtgtagatactccggccatgtgggaattctctaaacagaagaatgttcctatctccggtaaagacttcaagagcggtcagacactgatgaaaaccgtattggctccgatgttcaagactcgtatgctgggtgtgaacggttggttctctaccaacatcctcggtaaccgtgacggtgaagtgctggatgatccggacaactttaagacaaaagaagttagtaagctgtctgtaatcgacaccatcttcgaaccggaaaaatatccggatctctatggagacgtttaccacaaagtacgcatcaactactatcctccccgtaaggacaacaaagaagcatgggataacatcgacatcttcggatggatgggctatccgatggaaatcaaggtgaacttcctttgccgtgactctatcctggctgctcctattgcacttgacctggtattgttcagtgacttggctatgcgtgcaggtatgtgtggcatccagacttggttgtcattcttctgtaagagcccgatgcatgatttcgaacatcagccggaacacgacctgttcacacaatggagaatggtaaaacagacattgcgtaacatgattggtgaaaaagaacctgattatttagcttaattaaataagtggagagttgaaagttgagagttgaaagttgttgcaatgtaattgcagcattagacaacttttaactttcaacttttatttttggagcacatccaatcatcctccactctcaattttcaactctcaactctcaactattaatgaagagaccttcctttctacctgttttaataggcacgggctttggctctggtttttctccttttgctcccggtacggccggggcattgctggcttctatcatctggattgcactttacttcctgcttcctttcactgctttattatggacgactgctgctttggtggttctttttacctttgcaggtatttgggctgccaataagttggagtcttgttggggcgaagacccgtcacgtgtggtagtcgatgaaatggtaggtgtgtggattccgttactggcagttcccgataatgaccggtggtattggtacgtgatagcggcttttgctctgttccgtatttttgatatcgtaaagccattgggagtacgcaagatggagaactttaaaggtggagtaggggtaatgatggatgatgtactggcgggtgtatatagttttatcttgatagcggtggcacgatgggtgattggctgaaaagagttgcacggatgatctcgcagaagggtggagtctttatgtttttaagggcgcagctttcggctcaaatggcgactattgcagactttctggtgactatccttctggtaaggctatttgatgtctactatgtatatgctaccttggcgggcgctatctatggaggaattatcaattgcattatcaattataaatggacttttaaatcgaaagggaaaaaaacgcatgttgctgtaaaattcataatagtgtgggtttgcagtatttggctgaatacgtgggggacgtacactctgacggaatcgttagcgaaaattccgtgggtacgtgatacactcagccaatatttcggtgacttcttcatcatccctaaagtggtggtggcagtcattgtagcgttgttctggaattataatatgcagcgtttctttgtttaccggaatatagatataagaagcttgtttaaaagaaattgaaagaaaacagaagatttagataaaaacagatttaggtatatgaattacagagattacttacagcaactgatttataagattatcaatcctttgatacatggaatgattaaaataggcatcacccctaattttatcactactaccggatttattctgaatgtggtagcggcaggtatgtttgtctatgccggtatttgtggcggacagaatgatttgtccattcttggatgggcaggaggtgtgatcctttttgccggattgttcgatatgatggacgggcgtgtggcacgtctgggaaacatgagttccaaattcggtgccctctacgattctgtgctcgatcgttacagtgagttgatgactttcttcggtatctgttactatttgtcagtcaaagactatttcatttacgctatcattgcgtttgttgccctgatcggttcgctgatggtgagctatgtgcgtgcccgcgccgaaggtctgggcattgagtgcaaggttggatttatgcaacgcccggagcgtgtggttctgacaagtctcggagccttgttctgcggtgtattcaaggatattaccgcttttgatccgatgctgatattgatggtgcctttgacaatcgtcgctgtgttcgccaatatcacagctttcgcacgcgtgagacattgctataaggtgatgacagcgaacgaaaagaagaatgactaattaaaataacatccttaatgataaaaacaattcaaatgccgtcgaagaaagaaaccctgaccgttattgtcatcatggctctttttcttctgctgacagctgcttgtatcggactccgttccgaacatctgctgatggcggcactctatctggttttattttttgccggactacctacccggaagctggcagtggccttactgcctttcgccattttcgggatctcgtatgactggatgcgtatctgccccaattacgaagtaaatccgattgatgtggccggactttataatctcgaaaagtcgttgttcggagtgatggataatggtgtgctggttactccttgtgagtactttgccgtgcatcattgggcggtggcagatgtcttcgccggcatcttctatctttgctgggtccctgtgcctatcctgttcggactctgtctgtactttaagaaagagagaaaaacttatcttcgctttgcattagtctttttgtttgtcaacttaatcggctttgccggctattatatctatccggctgctcccccctggtatgctatcaactacggtttcgaaccgatactgaatactccgggtaatgtggcggggctcggtcgcttcgacgagatttttggcgtgactatcttcgactccatttatggaagaaacgcaaatgtctttgctgccgttccttcccttcatgcggcatatatggttgtggcattggtgtatgccattatcggcaaatgcagatggtatgtgattgcccttttctctgttatcatggcaggcatctggggaacagcgatctactcttgtcatcactatattatagatgtactccttggaatctcctgtgcactgctcggctggctgttctttgagtacggactgatgaagattcgcggattcagaaacttctttgaccgatattatcagtatattaaatagtgaagaacaaataccgcaatatattcctggcttttggcattgtcgccgtcctgatcatgatattcactttcgatatggattatcaggaactttgggcaaatttgaaaagggcaggagtatatttgcctttggtattattgctgtggctgttcgtttatctgattaatactacatcgtggtacatcattatacgtagcggagggaagccggggttttcatttgcccggctttataagtttaccgttacgggttttgccctgaattacgtaactcccgtcggactgatgggcggtgagccgtatcgcatcatggaactgaaaccgtatataggagtggagagagccacttcttcggtgattctctacgtgatgatgcacatcttttctcatttctgcttttggctgagttctgtcttgctatacctttgcctttatccggtagggtgggtgatgggaaccattttgggtgcaatcaccgtcttctgcctgctggtagcagtgctgtttgtgaaaggatatcagcatgggatggcagtcgctttcgttcgcctgggcagtcatcttccttttctgaaaaagaaagtcatccgttttgccgactcccatcgggaacagttggagaacattgataaacagatagccctgcttcatcaacagaagaagggagctttttatgccgctttattcttggaatatacggcacgtgtggtcagctgtctggaaatctggctgatcctcaatgtgctgacaaggagtgtcagttttgcagattgctgcctgattgctgccttctcttctttactggccaatcttttgttcttcttgcctatgcagttgggtggccgtgagggaggatttgcccttgcggtaggcgggctttccctttccggagcttatggagtctatgcggcattgatcactcgcgtgcgtgagatggtctggattgtgatagggcttgctttgatgaaggttggaaataaaaagtagctttattttactataatttcccagtatccgtttttgtttgatccaactcgctgaatcatacctttttgctttaatgatgtgatcaggcgttcgctatgccttaggctgatacctagaagtccggtgatttctttggcggtaatttgattgttttttctcaaaagttccagaactttttgttcgtttataccgacatttataccgacatcctttgtcgctttcattgttactataggatcgccttgccgtttctttagtgtttcgtatatttcttgtagcatgaagtcaatgaagataccactatttacagcatcagtacttcggtttattgcattataataggcttgttgattgatttccttcagaggagacatcctgatgatctattttataaaggtagaaactccaactgctccgacttagtttggtcgggcaattggagttttcttgtttataggctattcaattaaaacttttcttgatttctgcctcatgctttccagttattttccgcatcgaagcaagggcacgctttcacccattcttccggttctatctctccgttctcattccggtcgggactaaggtcgcggtgaccgcatacgcggcattccggataatctttcagtaaagtaagaaccagtacccgcagtgaatgtttctgccattcggtccgggtatctttggggcgacctttgctgtcgagcccgccttcatagcagataccgatactttctctgttgaaacctttggcgtgggcaccgaccttttctatcggtcgggtagactttatatccccgtttttgcggatataaaaatgataacccgctccgttgaatccgcgtcggcgatggcagacgtccaggtcatattccgtgaaatccttgtcttcgcgtgtggcggagcagtgaattacgattaagttgatcgttctcataatctgtccggcattaagcttcagagatggatgcctcgctttgtgtacgctgtaggcactctttgtttacgcactgtaatgtggcagcttgtgcaagttgttctctcaacgaaaagatttcggtgtgcatttctttcactctcgcgctcaggtcgaaataatctttcagtaccttttccagctgttccatcaggaaggtatactggtctttcaccagttcgctgaattctttgacgtcttgcgccatcgctttacgctttttacgattacccaggaaagggaggatagtcataataatctcgataattttatctagcattttttttaatggataattgataattgataatggggggagttgtacattaaggttagttcgatatagtatctctcattctgagcgaagcgacgaacctgagactgactaaaagtcggtagtatcttaattctcctccttcgggaaggaggagtccccgtagggggaggtggtaggtgaatgcataactctgttatttacaatagaataggaataaaccttgttttacctaccaccccggctttcagccacccatctttcccgaaggaggggaattgagatactattgactttttagtcagtttcaattgggagggctgctccagtgttttgtactgcccttccccaaaaaaagtcctgttaaactgtcgggtccggagcttcttcatcgcctccgctgtttcctccgcctccggtgtttcctccgccggcatttccgccttccgtgtcacctttgcttgctagtacgaattccacgttgttttcgcttcgtgtgctggtgtgacttgcgttcaccagatgcagtgctttatccgctacaaaccggacattcaccttgcggatgcttcggaccgtgcaatctttttccttctctgtcccctcgctgcacagtgtgatgtgaaacgtacccagaccgtcgatcttcactttgtcaccttgggtgagtgacaggcggagttgctctacaaaagcttcgatggcatgttttacatctcctgctgtgagtgaagagttggcttcgatggcatctgccagtttttcgacgtccatcactcttactgtacccgatttctgacgtacgtaatacagcatcggggaattctcctgacttacgtactttcttcgctgatagcgttctactgaaacattcataaatttaaaaagttaaggtttaagtaataattattttgtttctctatgacattacaaatatacgaaatataagaggtaaagtcaagcattatgccatttatttcattgcaaatatgaaataaaatcggaaaatattagaaataatattatgtaatataatattgttttgattctgtttttattttgcttgtttcagtaatacttccaatggtggtgtatagtccgtaattttcgttagagaaggattgtggctgaagtatgcgttccctgtctctccattgcgttgtttggctacgatgactacccccagtccttcggtcgggtagccgctttcccggtcggtagtgagccgtgccagtgcagggcggtagagcagcatcactacatccgcgtcttgctcgatggcgccgctttcgcgtagatggaatagttccggccggccaccgggacggccttccgactcgcggtttagctggcaaagcaatacgacgggaacgttcagttccttggcgagcaatttagccttgcgggtggcttgtgccacttcctgttcacggttgcggttcttctgtccggtgttcatgtcgcaaagttgcaggtagtcgatgatgatcagatcgcatgcactcttgcttttaaggagccgtgcgctggaacgtacatggtccatactgatcgatgtgctgtcgtctacgtgtatcggtagccgtgccagttctgcggcggtggtgtgcgcttccgctacttcgtgcgggttagggatgcctgtgcgccagcggtaagggttgatgtcgctggcggacaacagccagcggtcggcaagtcgttctccttgcatctcaaggctgtagacggcgacggcatgtttctgcatggcagcctgccgcgccagatggagggcgaaggcggtctttccgaccgaggggcgtgcggcgatggcaatgagttctccgttttgcagtccggacgtcatgcggttcaggtccgtcaggccggtggggatgccggtaattccgtttacgcttttggcgatacgctgttcggcttcttccattgtgtcggtcatcagtgcgtccatgtcgcgcatgtggtcgttgtggccgaattcaccttccaggcggtcgagcaggttgtgcgcatctatcagcgtatcggctatgtccattgtttcgtccagggagcaggcgaggagtttgttgagtcctagtatcatttcccgccgcaggtatttctcgtgtacgatctgcatgtgatattcgatgtgtgccgaggtggctactatgctgctcagtcgcgtgataccgaatgctccgccggcttcttcgagcttgccccggtgggcaagctcttcttttacggtgaggatgtcgatcttcattcctgcctggtacatggccagcagggcggcgtagatcacttggtgacgcatgctgtagaacatttccggacgcagcgtgtcggctacgagcggcatggcttcctgttctatcaggcaggcgcccagtatggcttcttctatctccggagcctgcggagaaactctgttgtcagtattcatattcattcagaaaggctttattggataaataactgcaggcatgtaacgtgaatttcatgtttgtctgatgataataatattcttcgatatggtcgatggcgagctgctgttctttttcgctcagctttttccagatacgctgcgccttggcgatgttctctttggggagctgtaggatgttgtggtagtcgtcccagaagaggcggaacttttcgtcgctggcttttttcttttggagctgtcggccggcagtaggaatgggcatatttacccagctatcataattgacgatgcggatgtgcagggcagcggtattcttgtgtgggatgatttcgatcattcctttagtttgcagatgttgtatgaaacggtaagttctgctcgccgaccaatgcaagatgacgctccagctgcggtagctgtgcagactttcgcctctttggcacactatgacgttgttccagtagtcggtgtgctgcgtttctgagtagttggttttcatgataattttcaggaaggcttcaacctctccttcgtgggtgtcacagtttgtgaattgctctgtcagcagagttttggggacgatgatgtagccatacttgatgtcttgcggattcattttttgcatgtaagattctgttttaaattttgcccgaaattaggttgattgcttcaaaatacctaaatgggggtacgtatatggatgtgcatggatgtactaaatcttgtgaggacgtaaattgtagtttggcggtgtgtgctgcctgttgtagcaggtgtgatgaaagaaaggaagaaaacagaggctctgtttggatgaaacggagcctctgtctgtggtaaacgaagcttctgtttggttgttttggagcctctgtttggagggtgaaggtactcatttgggtgaaacgcatagcggaacacttttaaggtggtataatgctttgattataagtgtattatatcggattttgaaaaaagtctgaaacgcatagcgaaaccataataatagaataactaataaattatatatttaaaaatatatagttcgattttctttttgaggacgattcatgtcaggcgtcatgcgattcgttggggcagctgtccggcagtgaaatgagaggaggtccccagtgcgcccaaatgatttgctgcatcttcgggcttaggatgatggtatgctctgtgtaatctgccttttccagttccgatttcaacgataagttctcgtcgattttctctcgcatactttttcttgccgaactgcagcttgcatgattcgggaagtattccgtagcgagctgggtaaaatgtttgaatccattgataatgtagccttttgtgacttctttttctgtttttgtcatattcaatttatttatttgatataaaccactgtttgtggtttattttctgcaaagttatgaaaaataaattgattgaatagtataaaataatttagttttatttttcgtttttacatctgtaaatttatatgtatatacctgctttattaaatttgtaattagggttatttgttgattataataaccatttatttgtggcggaaactttatgaaaaaaacatagcggtttctttttttgttgttttactctcagacgcatggcgaaatttgttggtcggatcattctgccggtgaatgagtatatgtctgaagggtattttggagagatgctaaaatacccttatatttatcgcgtaatttatttaatagtgattaaaatgttaaaagtagtagcatttatgaagcaagtagccaagggactacagatggagggaaactttggtactgcgcacgtctaccgtagcagtctcaatgccatcattgcttatcgtgggaaaggggattttacatttcatgaggtaacccctgagtggttaaaaggcttcgagattcaccttcgtggccgtggatgcagttggaatactgtatctacttatttacgcacgtttcgtgcggtctataatcgtgcggtagattgtcgtggggctgtttatgtaccgcatttgtttcgttctgtatatacaggtacccgtgcggatcgtaagcgtgcattggataccgaagatatgcagaaggtatttgccaaattaccttcgtctcctgccgtgactcctgctatgcgtcgtacgcaggaactgtttgtcctgatgtttctgctccgtggtctgccttttgtcgatcttgcttatttgcgtaaaagtgatttgcacgacaatgtgatcacttatcgcaggcggaagaccgggcgtcctttgtcagtgactttaactccggaagcgatggccatattaaaaaggtatatgaatcatgacacgtcatctccttatttatttccgttattaaatagtcgggaagggacgaaggaggcttatcatgaatatcagctggcactccgcaatttcaatagacagttgatgttgctcggtgaaatgttaggactgggggataagctcagttcgtatactgctcgccatacatgggcaacgacagcttactattgtgaaattcatccgggcgttatttctgaagctatgggacattcgtcaatcacagtgaccgagacgtatctcaaacctttccggaataagaaaatagatgaagccaataaaaaggtggtggattttataaaacactcaatgctgttggcaatttgttgatttttaacccgttactctgtaggtaacggagctgaatagcgttgcaaagatggatatattttggaaaacatgcaaacaaaaatgatatttttctgataaacaactaaaaaaagacaaataacacaataaaacagcggatttcttagcgttagactttgtagcctttaatttttagataatagatttccctcccctctgccgcctcttagaagcaggggtaaagatgtttctgtattccataaatgatttttcagtattgcttacccctccggggcaggcacaaaggttttcccgttacctacagagtaacgggaaaggctaatatagtctatatgcttcaaagtatattgtgtaaggtaattgaaagtggaaaacaaattaagaaaaggaggtttgcacaagaaatgaaaggaataaaacatgggatgtagtaagggaattcataatccaaaacgagaaacaatatttttattatttttttaatttataaattaaaagttttttatcatgaacaaaaagtatttaagtgtcgtcctgtttggagcgctattagcggcttcagcgggtacatttacttcttgtaaagactacgatgatgacatcaaggggttgcaagaacaaattgacaaaagtggaagcactattactgaccttcagactcagctgactactttgaaagctgctgctgatgctgctcaggctactgctgacgctgctaagactgctgccgctgaagccaagactgccgccgatgctgccaaagctgccggtgatcaggctaaggctgatgctgctacagcgttagctgctgcgaaagcggccgaagctgctgctgcacaggcaaaggctgacgctattgaagaagcaacgaaacaggtggaagctttgagaaattcaatgcaggccgccattgacaagaaactcgatgttaccgcattcgaagaagcgtcaaaattgcttggtgctcgtattgatggtattgaggctggtttgagcaacctgaagaatggcgctgtgaaagaaaatacagaggctatcaagagtgctcaggacgctatcgaggcattgcaatcggcagacgaggacttcgctacaacgttgaaagaactggatgaatatgtgaaaatcacattggaagccaaaatagacgttaatgcggatgacatcaaagctgcacaagatgatatcaaagccgcacaagaggatctcgacgctttgtggaaaaaaatcagtggcggcgaaggaagtctggaagacttgatctctaaaaatgcaacagctatcagtgatttgaaagatgctatagaggacgaactggatgttattaaaggagatatcaaagatattcaggctgatatcaagaaaatcaacggtcaaattacagctatcaatcagaacttggcaggtctgcatacgttggtggtatctcgtctgacaagcatttcgcttgctcccgatttgttcgttgacggtattgaagctgttagattcacttccttgcaatattctccgatgggcgagagtgaaaatgcaagtatccccgctacttcttataaattctctacagctgctttggcaactgccagctatcacttcaacccggcaagcttcaagttggcaaatgctgactatggctacattgaccgtacggcagaagtggttgaaacaactcgcgcaattgctgcaagcaagttggttgaaattgttggagaaccggaagctaatcctgtaacaggaactgttgacttcaagcttcttcgcctgaactcccacacaactcagccgggacttgacagaacgaatatgatcgctctgcaggctacgctgaaagggaatgctgtggacgaaggtgagaaaaatgccgtcattactgctccgtatgtagctgtatacgatgcaatcctgtcttacgaagatgttcgcatcgctgacaaggaaacactgactaccggtgctgacgaggctcattatgcaacaacgttcgacgcttgtacgaaagaagatcctcgctacaagattccttatgataaagaattcaatttgaaagatttggtggctacttgtttcggtaataacggtcatgatgaattcccgatcgctgattataagttgtcatacagattcgctgtggcatctacagcttataatattgaagagggtaatactgaaactaatcagcagaaatggatcaaatgtaatgacgctatcgaaggtaagtaccaggcagaaggattcaatccggaagcattcggtcgtactccgattctgaaagttgaattggtggacgaagctggtaatgtagtacgtcgcggattcgtgaaagttgagttcattgctgaaaaagaatcagactttacagtgggcaacgaagctaaagaacttactttcgcatgtaatgcaacagaggcttcatatactattacagaagaatttatccgtgaaaatgtttaccgcaaaattactaatggtactaacattggtatgagtcatgaagaattctggaatatatatactacctctactgctgaagtaaagaagaataatcaagtattctcaatgtctgttcctaagattgtagatggtactactgaagtaggtacagcaacgaagaagatcgtttgggaatttactcatggcgagctcaaagctatcggtgccggtggttctcaatttgtggctactataactgttaagaacaaattacagtcttctaagtatccggataagatcacattcaagtttattgttaatgtgaagttgccggtagctaccttagagtcagtgaagaacgaactgttctggcagaacattgatggagaacttaagttctttaaggtgaacgctgaagtacctgatactccggaagatcctgcagacggatgtctgattcatcaggaattgggtcttgcttatgataagtacgacgtgaagggacttccgacttgtgtaacacatcgttatgttgtaactaagacttattctgacggaaaagctacaagcaaagttttggctggtgttaagattgacggagaaacgatctcattggataaggacggtgctaatgctactgctgttaaggctgctctgaatagcgcaggtggtctgcaagcttcagttgcacacatctatactttggaaagtggtgatcagattactgtaaatgaatttatggttaactttatccgtcctgttagcttgaatatgcctagtggagttactctgacagacgctgtgacaggtggtgacattgctaacttccaatggaacggtttgctgatggattggagtggcaatgctatcgtatctccgagtgtggtggaaactgaagatatttcttcatactggaagagagtctgtgtacctgaatatgaactgactgagggacattacaatatagtaactccggcaagtctgaaaactacaacaggaactgtagacatcgttactgccagccctatcaccacgtataatggttcggctacatacacctatacacagattactgacggtacaactacaacaaccaagacgtatacaacaccgcattcaatggtgactaaaggtgaggttagtaattatctctatgcacaagcacttaatggtgcacctgccggatatcgcctgactgctaatggaactgtaaactatacagaagttcttgtttcagctggttctagtattacatatacatatatagcaagcattgactatactcctgccgtaatagaatggattccaggtgaacctgttgctaaaaagcatgaccatacactgcagcctaatttcgaaggaacatcgtatggccagaaatcaggatgctgggaatggactaagactacattcagtagctcagttattaatctcggacaatactggttctattatggagaattcagtgaggtgaaacttgacattgataaagttactactgacttgaaatataatggtggtaaactgcctgataaggctactttagaacaagttggtaataccgttaagtatgtcaatgttaaatcaccgattgaatacgcttacaagatctttattcctgctactgtaaactacggttggggaacactttcttccacattgactattacagttaatccgaagaactaagagatctctgaatgtctatcgattcttagacatatattaattccgaaagggtgctctgctctagtcagagcacccttttcataataacaaagcagatattgggtgataagatttgcctgatatatagttgtgacacatcgtatgagatttctgtaacaagacattaaatacataacattatgaaaataagaaatttattagtagccatacttgctatcagtggtacggtagcatttgctcaagaacaacgccaaatcaaagaagaaggtaaaaccgtattcaaacctcactggtttatccaagcacaggtaggagtcgcgcataccgtaggtgaagcaaagtttaccgatctgatgtctcccgctgctgccatcaatatcggatataagtttgctcctgcattcggagcacgtatcggtggtagcggatggcaggcaaagggtggatgggtaactccggaacaaacttaccagtacaaatatcttcagggaaaccttgatattatggctgaccttagcactttgtgctgtggcttcaaccccaaacgtgttttcaatggctacctttttggtggtgtagggctcaaccgtggtttcgacaacgatgaagcgaatgcactcgacacccgcacctatgaactggaatatctctggcaggaaggcaagtttcttgtggctggacgtttcggcttgggttgtgaccttcgactgaacgaccgcttggccatcaatatcgaagccaacgccaacgctttatccgataagttcaactcaaagaaagccggcaactgtgactggcagctgaacgcactcgtcggcttgaccattaaactgggaaaaagctataccaaaacagctcctgtatattacgaaccggaacctgtagtcgtggaacaacccaaaccggaacctgttgttgtaaaagagccggaaccgaaacctgtagtagttgtggagccgatgaaacagaatatattctttgcattgaactctgcacttctgcaagatgaccagttggcaaagattgatgtcatgattaaatatatggagaaaaacccaatcagtaaagttactgttaccggatatgcagacaaggaaaccggtaactcgaatatcaatatgactttgtcggagaaacgtgcaaagaatgtggtagaagccttgaaagctaaaggaatagcagccgatagaattattaccagttataaaggagatacagtacagccttatcagaaacctgaagaaaaccgtgtatgtatctgtatagcggaataaaatttgtagcaagaacccttttctttttaaaagatattcccctattctcatgtgaggtgtttgttccccacatcttttcgtattcgtacgagaaccctcacatgagagtattaggaaatgcatgcttgtgaaagtctgtatttccgcaataaacccctttcttcactgaaatgtggagaaatcatgttggggagtagcagataagattgtacttgtgaaagtgtgtcttattctgtcccccaaagaggatgcccgccctttttcctagtggcatcctcttttttttgtttttactatacaattttgtttccgataaagaaagaggggggattttgtatcaaacttacattaaataaaagatgaagatcaaaggtcaacttaaagttaagctttgatcttcatcttgcaatatgggatatttaccgatcccgttctatacagatagacggtgaaaactataatgcttctattttttctatgctcaatccggtagctttggagataatttccagtgaaactcccatctttttcaggtttcgggcagtttcttccttaccttcagcacgtccttcctctttgccttctgcacgtcccttctgttctgcaaattccagcgtcacgagattatcccggtacactttgatgctttcgtcatacttcatccgctcctcttttgaaagcgaagcgatatctacaatcttttctaatttctcaaaaaccgatttacgggctttgaatggcaatcttttcaacgtttccatattcttcagtacataaatccatcgttcaaagtcagtctcacactcttgttcctccttcgaaaaagcaggcaactcgataaaaataaaacgaagcttgtcggaaaattgttcgtgcgtgtcacgatctgtaagcacaacatccgtacgaagcttatgcggcaaattgtccaaccggaaattcataaagaacacaccgtatacggctttcaggtcaaacttccattcagctcctttctcaccctgccgggcaacagtctttgaaaggtaatacaaggcacgttcacgaaagtgtacatgttgcttgttctgcatctctacgataaactgttctccgctttcagtgatacagtagatatcgtaaatcacccctcggtcgcccatatactcgggtagtatttccttatcgagaaaggttatgtctattatatgtttttcatctaccagcaggtcgttcaagaaatcaattaacaagtctttggtcatttcctgcccgaagatttttttaaatcctacgtcggtaaatggattgataaatttcgtcattatttctgtttattagttgtttgcgactccacaaagataatgaatcttctgtctgcttgttacgataatgatgattttatctgtctgcaattatattttgtggggaatcctgctgaaacataccagctttcttttttgttagtttcacatgccggtcattgattcacatactgtccggacaactctaaaatgaatgaatatatgtgtatcggatagctttggttacgaaaatacccttatatttatcgcgtaatttatttaatagtgattaaaatgttaaaagtagtagcatttatgaagcaagtagccaagggactacagatggagggaaactttggtactgcgcacgtctaccgtagcagtctcaatgccatcattgcttatcgtgggaaaggggattttacatttcatgaggtaacccctgagtggttaaaaggcttcgagattcaccttcgtggccgtggatgcagttggaatactgtatctacttatttacgcacatttcgtgcggtctataatcgtgcggtagattgtcgtggggctgtttatgtaccgcatctgtttcgttctgtatataccggcacgcgtgcggaccgtaagcgggcgttgtgtgatgaggatatgcagaaggtttttgccaaattaccttcgtctcctgccgtgactcctgctatgcgtcgtacacaggaactgtttgtcctgatgtttcttctccgtggtctgccttttgtcgatcttgcttatttgcgtaaaagtgatttgcacgacaatgtgatcacttatcgcaggcggaagaccggtcgtcctctgtcagtaacgttgactcgggaagcgatggtcttattaaagaggtatatgaaccgtgacagttcttctccttatctgttctctcttttggagagccgtgaagggacgaaggaggcgtatcgtgaataccagttggcattgcgcagcttcaatcagcaactgttgttgctggggcaattattagggctgggcgacaggctgagctcatacacggcacgccatacgtgggcaacaacagcttattattgcgaaattcatccgggtattatttccgaagcaatggggcattcgtccattacggtaacggagacgtatttgaaaccttttagaaataagaaaattgatgaagccaatcaactggtaacggattttgtgaaacggacagttactggattaatagcttgattattagtgatgttactttgtaggtaacggagctgaatagcgttgcaaagatggatatattttggaaaacatgcaaacaaaaatgatattttttctgataaacaactaaaaaaagacaaataacacgataaaacagcggatttcttagcattaaacttttgtagcttttaattttagataatagatttccctcccctctgccgcctcttagaagcaggggtaaagatgtttcagcattcaacaaatgatttttcagtattatctaccctctcagggcaggtacaaaggttttcccgttacctacaaagtaacgggtaaaaagtattgggagtaagtttcttgttcatccccctgtggagtatgaacacaagtaaaacaaaaaagaaaaggaggttatactgaaaatgaatggggacaacacatgagagttttaaatcaacaatgcgagactatatttttattatttaatttataaattaaaagtttttttattatgaacaaaaagtttttaagtgtagtcgtgtttggggcgctgttggcgtcttctgcaggtacatttacgtcttgtaaagactatgacgacgacatcgatgcagtaaacggcagaatcgatgaactcgcaaaaagtctttcagatttgcaggccaaagttgggtcttttgtaaagtctgttacttatgatccggctacgggaaaattgactgtggtagatggagagaacaacagtgtgtcttatactatcggacagaatttgccgacttattcaattagtgtggataaggaaggtaaaatttcgctgttgaaagacggtgaagttgtttcgtccggtactattacattcccggatgctcctacaactccaaccattcctgatgcttttgatccttctaaattgacagtggatcctacgacaggcaaagtaatgtatgatggtaaggaaactggtgtaactatacctggtgacggagttcttagtattgaagataagaaaaacgctgagggcgttgttatcggctatacgattaagtacaaagatcaggctgttacatttgctttgaatgacgtattgactctgaaaggtcttgttttcaaatctgatttgtttgtagacggtatcgaagctatcgaatatccttatttggattatacatataaggcaggaagcactgcagctactactcaatgggaagatgagcaagcagagaaagttctgtgtaaagtaattactgattcgaaagaatggaactatacaggtggtaccggagctcaatataatccgattgaatatattaattatcacttgaatccgtctagtgcaaaagtaagtaaggaagatttgtcttttgtatccagagatgttgaagtgatttcttctcgtgcttcagtggctcttcctgaagtcgctgacatgaaacctgctgatgaaggtatccttccggtaggactcagagcaataggaaaagacatcaaacaaggaggcgaaggttctatcttggctttgcaggcaattgttaaagcaaaaagtgatgctcaggcagatacaactgtaacatctgattacgcattgctttatgcttctaaggttactcctcaggctattgcatttaatgatgctactttagctgctgaagattgccgggaatctgctaatccggacgagttgttcaagactgtagaaggtgctatcacacatgctcctactttgacagttgcttataatagctttattgatttgaagaatctgttgacaattcactataatcgtgaaggtcagcctgaagcaacaaaaaatgatggtactcataaagtttgggcttatggagatgaagctaagtatggtttgaagtatgacttcgcgttcattcaatatacatcaggtcaaaatgtaacttctgacagtaaatatgcagatgcaaacactattaaagaaggtgtacttactccgcgtattgtaaactctgccggtgagactcttaacgagcaaggtgtatcttctgtaggaaaacgcccgttggttagagtacgtgtgacagatgcggatggccgcgttgtcttggctggattcattaaaattgaaattgcaaaacaggttgatgatatcgttacaagtgtattcgacaaaggcactcacaactttggatgtgatgaggctgatgctatcttgacatggtctgagatttcttatcaattgcttgaaaaagcagctgttcagtctaaggatgaattcgatgctttatatgaattcgatgtagatgatagtggtgtagccaaacagtttgctaaatcagccgatggtaagtcattcgttccggctgcgattgcacaggttattggaacagtgaaagaaaaggtggatgaaactggtacaacaaatacagttcttcactggactttgactactgcagaacagtctggtatttatgaaatggcaggtcatacagctactatttatgtaagatatgtcagcaagctgaatactacatctcatgctcctatctacatgcctttgcagatagctgtcgctaaacctcagggaactgttgttactaagttgactaactactggtacagtgacggtgacgttgctaaggatggtcagaatactcgtctgaatgttccttatccgcaagataacggcaatacattgaattatgtagttgacttgaaccaggtatgggaaaagggtatgcctacatttactcctcctgcaaactttgcttcttatactgatgtaatatttgcaaatcaaaacggcgctgccggaggttataagtattacttcgacgctgatcagaatgtattgactgttgatggaactaagtatacattgtcagtagataatgctacagcaccttgtattacaggcggttcatataaagctacagctcagaacatgatcgatcatgctttgaaagtagatgcaggtgtattcactaatacgaagttgtatgctaatggaactgttattgcaacaatcgatcagaacaccggtaagattacttatgaaaacaatgatacttctaagaagttgttgaatgcatatagccatagtgctgctaagcattttgctaagatcggtatttgtgcatacagtccttgcaacattgcaatgtctttgacgaacaatacatacaatgcatacttcctccgtcctatcgacgcagtaggtacagatggtggagaattcgttgatgctcatgctaatggttctactctggatatcgctaagttgttcaacttccaggattggcgtaatgttaagttcgtagatggaactgactattcaaacagctggttgtatgcattctacggattgaataaggtagaagtgaaaatagcagatgctacaactaccttaagtggtggtaagctaggagagactttattgtcaagcaaaacagagaaaatcgtattgactcagatagataaagatggtaataaagttacttctgctactttaaatctttcttcttataatactgaagcaagtggtactcaagctacatatgatgcaattgttgcagctatgggtaagatcaagtatgtaaacaacggtaacaacgttcaaacatttgaactgcgcatcccggttgagttcacctatacttggggtactgtgaagactacagtagattgtacagttaagagtacaatgggtaactaatagtaaaggtttcattactaaacactgataaggagggtgcgccgatcattggtgcaccctccttcacaataagaattgaaggcggaatgaaaaagaaagatctgttatatatatgtgtgttggttgccgtttcttgtttcttgttctcatgcggagaaaaaaagaagcagctcactcccaaagaagaattcttaatggggttgacagctgaagatacggtgcaagtacttaccatatcacgcagttgcatggatacattgaaagccggaaatatagatgaagcgctgaagatgctttttatcttgcgcgatggaaaagcgatacctcttcccgctgagaaggaacaacaactgaggaaaaaattcaagtattttcctgttgtagattataaattggattattattctttttcaagtacggataataacgatgtgaagtttcagatagagtttttcaagcacactagttcggatgatcatacgccaaatacaattggatttatgtttaatccggtgaaaatagacggagtttggtatcttgccgttaaagaggctaccaaggaagctactgataagtagtagatgaatggtgacgagtactgttgtcattggtttttagacttttaaacaggttttgattatgaatataaaaaaaatattagttgctgtatttgcgttgagtactacaatagcatttgcgcaggagcaacgtatcaaagaagaaagtaaaacgatatttaaacctcattggtttattcaagcacaaataggagctgcacatactgtaggtgaaggagaatttactgatcttatttctccggcagctgctcttaatgtcggttacaagtttgctcccgcattcggcgcacgtgtcggtgtaagtggctggcaggcaaaggggggatgggtcaatccacgtcagaactatcagtataaatacctgcaagggaatgtagacatcatggcggatctcagtactttgttctgtggcttccatccgaagcgtgtgttcaacggctatctttttggtggagtaggactgaaccgtggttttgacaatgacgaagcaaatgcgctcgatacccgtacttatgagatggaatatctctggcaggaaggtaagttcctcgttgctggacgtttcggtcttggttgcgaccttcgcctaaacgaccgcctgtctatcaatatcgaagcgaatgccaacgccttgtctgataagttcaactccaagaaggccggtaactgtgactggcaactgaatgcccttgtcggtgtaagtatcagactgggtaaaagctacactaaaaccgccccggtctattacgaaccggaaccggtagtgacggaacaacccaaaccggctcctgtagtagaacaaccgcaacccaaaaaggaagtggtgattgaactgttgaagcagaatatcttctttgccttaaactctgcaaagattcaggacgatcagcaagccaagattagttctttagtagaatatctggagaaacattctgccgccaaggtaagtgtgacaggatatgctgataaggaaaccggtaacccgaatatcaatatgactttgtcggaaaaacgtgcaaagaatgtgattgagatgttgaaagctaaaggagtggcagctgatagaattgttattggttataagggagatacggtgcagccttatcagaaacctgaagaaaaccgtgtatgtatctgtatagcggaataatatttgtgattataactctcttttcttaaaaaagatattccctattctcatgtgaggtgttttttcccacatttttcgtattcgtacgagaatcctcacatgagatgaataggaagtgcgggcttgtgaaagtctgtgtttccacaatagacccctttcttcacttgaatgtgaagaaattgtatcagggggtaacagtataagattatacttgtgaaagtgtaccttattctgccccaaggaggatgcctgcccttttttccctggaggcatcctcttttgttttttttgtatctgaaggtacgtgtatcaaaagttaaaagtaactaaactctcctcctttaggaaggaggagtacccgtagggggaggtggtaggtgaatatataagctattgatcttcagctgtgaagtacacctaccaccccggctttcagccacccctccttcctgaaggaggggaatttagttacttttgacacactttctttttgttattatacagatcgaacattgattaacatactgtccatacagctctaaaatcaatgaatatatgtgtattgggtggcttcggttacgaaaatactcttatatttatcgcgtaatttatttaatagtgattaaaatgttaaaagtagtagcatttatgaagcaagtagccaagggactacagatgggggggaactttggtactgcgcacgtttatcgtagcagtctcaatgccatcattgcttatcgtgggaaaggggattttacgttcaatgaagtaaccccagagtggataaaaggcttcgagattcaccttcgtggccggggatgtagctggaacactgtttccacctatttacgcacatttcgtgcggtctataatcgtgcggtagattgtcgtggggctgtttatgtaccgcatttgtttcgttctgtatataccggcacccgtgcggaccgtaagcgtgcattggataccgaagacatacagaaagtattcaccaaattgccgcagtcgtccgctgtgacatctgacatgcgtcgtacgcaggaattgttcgttttgatgtttctgctccgtggtctgccttttgtcgatcttgcttatttgcgtaaaagtgatttgcacgacaatgtgattacttaccgcaggcggaagaccgggcgtcctttgtcagtgactttaactccggaagcgatggctatattaaagaggtatatgaatcgtgatacgtcatctccttatttatttccgttattaaatagtcgggaagggacgaaggaggcttatcatgaataccagttggcactccgcaatttcaatagacaactgatgttgctaggtgaaatgttaggactgggggataaacttagttcgtatactgcccgccatacatgggcaacgacagcttactattgtgaaattcacccgggcgttatttctgaagctatgggacactcttcgatcacagtgaccgagacgtatctcaaacctttccggaataagaaaatagatgaagccaataaaaaggtggtggattttataaagcgctcaattccaatagcaatgtattgaatttaagcctgttacttcataggtaacggagctaaacagcgttgcaaagatggagatattttggaaaacatgcaaacaaaaaagatattttttctgataaactactaaaaaaagagaaataacacgataaaacggcggatttctttttattagacctttataaccttctaattatattcaaagatttccctcccctctgcctcctctttgaagcaggggtaaataagtttcattactaaatcatacagtttttcataaagaaggcttcatgagagccaggacaaaggtttgcccgttacctatgaagtaacgggcaaaaagtattgggagtaagtttcttgttcatcctctatggagcatggacacaggtaaaacaaaaaaagaaaaggaggttacactaaaaatgaatggggacaacacatgggattattgaatcgacatcgagagattatatttttattatttaatttataaattaaaagtttttttattatgaacaaaaagtttttaaatgcagtcctgtttggagcgttattagcgtcttcgacgggcacatttacatcttgtaaagactacgatgacgacatcaatggtctgagcgaacgtgtggatgcagtcgaaaaaacattagctgacttgaataccaagttcggagcattggcttatgtgaaatcggtatcctttgctaatggtgtattgacagtaacagatcaatcggggactcctactacttatacgatccctgataacgatacgaatactacgtacactttggatgtaactagcagtagagaaggaaatgtgactactgttactgttactctgacaggatctgacaattctaagatcgtcaaaacatttacaatcactgataacgatacagtaactcaagacactaaattagatcctactaagttctggatggactcagaaggtgtgatgtggtatggaacaaaggatgataaagaaaactctattaaaacaggagtagctgttccaaaacaaccgcaacatgataaaacgactgtaagtgttgttcagtataaagatgagactggtgttgtagtaggatgggaaatcttagtagataatcaacctctctcaactaagttgcttattcaggatgtactgccaatcacaagctttgaatatatcccaacgaagattttggccggatggggtgaaagagtaattgtgtttgaagaaaactcatacaaacagaaaacgattgtagctaacgaagttaaaacatctgcaactgctactttatatatgtcaaatgtagctgctcctcaatatcgagttaatccgtcgagtgctacgcttgctcaattgacagaagaaggtaaagctcagattttgaaacagactgtagaacaggtaacaagaactccgggtgtatttattgactggaagaaaactacaatagaaaatggcataatgactgtgtctctggaagctgaccctgctttatttgaagatgaagtagataaattggacatgattgctctccagtttgaaacaactgcaaaaaataaagttaccactgaatatgtaggtgttatcaacaaagatgctgagattgatgttgtcttgactgataaagctgtaacagctactaatccgggagatgatgctaatcactttgttattaccaaggctgatgctgaagctcaggtggctaagattgatgataagaatatgccgatgacaggaaatgctgctttagttcagaatgttacttattctgaggctattgctggtatcaacttgacagaacttgtttctgcatgtaatgtaaaggatgctgctggtcataagttctttgactatactaagtatcctgatctcacattgtcttttgaagctgttgcttataaagttaatgaaactccgcaagagcgctatatgagcttagatggtgtaacattcaaggctgtaaactatggtaatgtgaatgaaagctgtattggtaaagctccgatggtactggctaaattgacagattcacataatggaaatgcaatcgttgctgctgcctatatcaaattactgattgtgggtgacgctgctgctaaaccggaaccggatatcactatcactgaaaatgctactattggcattgattgcaacaattctgcttacacttggtcaactaatgacgagttcatgagtactcaggtgtatacattcagtacaaatgaaaaattgacagcattgagtaaagaacaattccatacactctatggatatgctgctgctcctgttgttggatttgataacgtaggtacttggaatgtaacagaaatcctgacagctggtgataataaggctaaccgtggagctaaattcgaattgacaactgcaccgttggaggctaaaacttatgtggcttatgctgtatatgagaaaacaacagatgctgatgttatcgtttctattgcaaatggtggaatgtatccgaaatatgttgctattaagcatgttgtaaaagtagatcctatcaactttactgcaactgctaaagagaaagcgcccaatgcttggaatggtaatacagcttctatctattgtcagactcctggtactactaacacaacgcagattatcggtgatttgaatgaactcttcgtaggcggtaaagttcagttcgattattccagctcatttgatgctgagaagttcccgagcttcgtagctgataatatggagtatacattcgtgttctctgaaaagaacttgaaagctacacgtggtttggtaacaggtgttgatggtacacaatatcaattggcgttgaacgctgacaagactgaattgcatgctgttggtaaagacttgaccggtactgctgttgctagtgcaataactgcagataatttggtagcaagcttgtctgatgctaataataatgatgttacatttgcgaatactgctgttgctaagaatctgttgaataaagaagcccgcggtgctgatagcttctatgcagttatggacatcgtttatgaaaatggttgtgacatgacagtaccagttactaacggtgaattcaaccttgcctttatccgtccggttaatgtttcttctgatgcaagcaagttctttactgacggtttgaacgaaggtgatcctgctaataccttgaagttaggtgaacttgttacctttacagactggagaaaagattctccgctgaatagcttcgccgctaatttggattactatagatattatggtgtaactaagattgaatgtaagggtaatatagcagatgtagttgaaacagactggactggaacaagaaaaacactgaaggaagcatttggtgctgaattggctagtcagattataacaattacttctaagaatgttacttatactactgctgaggtaactgctgttcctgactttggtactgcatcttatatcaagagtagtagagttgagattaaagactacaagctttacattcctttgactattacttacacatggggtactatcgaggaaacaattgaagtacaggttaaagctacaaaataatttggactaagaagtaatgaggttgtgatttatgcacaacctcttactctctttttttaatgcagctaaatactgtatagaaagaggttgcattctcattattgtgagaaaatataagtgtggaaaaggagagtgtgacaagaaggacacgctctccttttttcataatagttaatatacaatttaaatataacgaacgagatgaaactaaaaagaaatttggtcctggctgttctgtgtttgagtacgatggctacttttggacagagcgaatctcaatcttcacgtataaaggaagaaggcaagattactttcaaacctcattggttcattcaagcacaaataggagcagcccataccgtaggtgaagcaaaattcactgatcttatttctccggcagcagctcttaatgtcggttataagtttgctcccgcattcggcgcacgtgttggtgtaagtggctggcaggcaaaggggggatgggtgaatccgcaacagacctaccaatataaatatctgcaaggaaatgtagacatcatggcggatctcagtactttgttctgtggtttcaatccgaagcgtgtgttcaatggctatctttttgccggagcagggctgaaccgtggttttgacaatgacgaagcaaatgcgctcgatactcgtacttatgagatggaatatctctggcaggaaggtaagtttctcgttgccggacgtttcggtcttggttgcgaccttcgtttgaatgaccgcttgtctattaacatcgaagcgaatgccaacgccttgtctgataagttcaactccaagaaggccggtaactgtgactggcaactgaatgcccttgtcggtgtaagtatcagactgggtaaaagctacactaaaaccgctccggtctattacgaaccggaaccggtagtgacggaacaacccaaaccggctcctgtagtagaacaaccgcaacccaaaaaggaagtggtgattgaaccgttgaagcagaatattttctttgccataaactctgcaaagattcaggacgatcagcaagccaagattgcttctctggtagaatatttagagaagaatgctactgctaaagtgagcgtgacaggatatgcagacaaaggaactggtaatgccagaatcaacagcaaattatcggaaaaacgtgcgaataatgtagtggaagctttgaaagcaaaaggtattgctgccgatagaattacagttgcttataaaggtgatactgttcagccatataatactcctgaagaaaatcgggtaagtatctgtattgctgagtaaatatggcacacaaaggctattaagaatttaaaatttccctatttctcatgagagagttttccccacttctttatatatatcatttatataaggtgttctctctgagaatcttaagaggtccgtacttgtgaaagtccgtacttctgcaataataaccctttcttcacttaaatgtgaagattacattggggaatagttggaaaggtggtgcttgcgaaagtactcctttctcttacctatttcctgttggaggatgtctccctttttcccacggacatcctcttttatacaaaaaggcgactcatactgaatgggccgccttttctgttatttaatctcgatttcctccttcatatcgatttcctctccatgtgtatcgtagaacacatattgcaggaaagcgagtttctgacttggaatgatcttgataccgaatccgtatttcatctgccacttccgtctgagggaaacgagtccctgattgatgaaggcggcgacatacggatggacgtgtaacgagaatttctttaccttcagtttgttgaccagataatcaattttactctctaaagtgtccgtaaagagaatggacgatttgatagtaccttttccgaagcaggtagggcagatttcggtcgtgttgacgtccattgccggacgcacgcgttggcgggtaatctgcatcagcccgaatttgctgagcggcagaatattatgccgtgccctgtctttctgcatgttggcacacattcgttcataaagcttctgacggttttcggcttcattcatatcgatgaagtccacgacgatgataccacccatatctcttaatcgcagttggcgagccagttcgtcggcggctcccagatttacttcgagtgcgttaccttcctgcccgttggcattcttggtgcggttaccgctgttcacgtctactacgtgaagcgcctcagtgtgctcaataatcagataggcaccactcttgtaagagactgttttaccaaacgatgatttaatctgcttggtgataccgaaattgtcgtaaatgggaagctggcctttgtacagtttcacgatgtttgcccggtcgggtgcgatcagtgtcacgtagtctttgatttcattgtacacagcctcgtcgttgacgtgaatattctcaaaagaagggttgaagaggtcgcgcaacaaacctacggcgcggctggtctcttcataaatcaacgtcggatacttggtggctttctgtactttcgccattgcatcttcccaatgcttgatcaggactttaagctctccgtcgagttcggccacgcgtttgccttcggccactgtgcggacaatcacaccgaagtttttcggtttgatgctcatcaacagttgtttcaggcgggcacgttcttcgctcgatttaatcttttgcgaaacggaaaccttatcattaaaagggatcagtaccagatagcgtccggcaaacgaaatttcggacgtcagtcgcggtcccttggtagagataggctccttaacgatttgcaccaccacttcttgtccgacctttaatgtattggccactgtgccatccttgtccaggtcaggaagtagggttgctttactgatggagttcagcttctttttgtcgcttaaagtctgctttacaaacttttcgagtgagttaaattgaggacccaggtcaagataatgaagaaaagcgtctttctcgtaaccgacgtctacaaagcatgcattcagtccgggcatcaatttcttgatacgtcccaaatacatattgcccactgagaaagaaatgtttcttccttcgctttgaagttccaccagactcttgtcttcgagaagggcgatggagacctctttgggctgtacgtctattacaatttcacttgtcactgttttgctttcttattattgattgaatctcatttatatgaacaacttttttgacaaaatgttcatttagggttagctacttaaacaaagaacaaacttgaaagacatgtagcttcgcaagtttgttctttattctgtttgatcagacttaaaaattattttttgcttttatgtctgttctttcttagtctttttttacgcttgtgcgtagacattttatgtctttttttcttttttccgcttggcatagcttcacattttatgggttaatactcttgtttattatttctttactgaaattgtaaatgtcttagccggtttgaaggccggaatgttgtgctctggaatgatgatagtagtattcttagaaatattacgagctgtcttttgagctcttttcttaactacgaagctaccaaacccgcgaaggtatacattctcatcgttagacaatgagtctttaacagcttccataaatgcttcaactgttgtaagaactgttgtcttatcaataccggttttctttgtaatctcgtttacaatatctgctttagtcatttttccttaaaaaaaatattattactaggttcttgctaattttttggactgcaaatatatagctttttggtctcctaaaaaaatatattctgcacatttttctaaaaaagtggaggcattaagttttcttagagacaaaagagttacttttgtactgcttttggatagtatatacgagataaatgttagatgatagatcgaaatcaggaatgaatatttttagtgaggctatagttgaatggtataaagaatacaagcgtgatttgccttggagagaatcgtcggacccgtatcggatctggatatcggagattattctccagcagacacgggtggcgcagggatatgattactttctccggtttatcaaacgttttcctgatgtgaaggcattggcagacgctgacgaggatgaggtgatgaaatactggcagggactgggatattattctcgtgcccgcaacctgcatgctgcggccaaaagtatgaatggagtttttccggaaacataccccgaagtgctggcgctgaaaggagtaggggagtatacggcggcagctatctgttcttttgcctacggtatgccttatgcggtggtagacggaaatgtgtatcgggtactttcccgttatttcggcattgatactccgattgactcgacggaaggaaagaaactgtttgctgctctggcggatgaaatgctggataagaaacagccggctctttataatcagggtattatggacttcggagcgatacagtgtactccacagtcacccgattgtttgttttgcccgttggcggatagttgttcggcactttcaacaggaagggtgactcagcttccggtgaaacaacacaagacaaagacgacgaaccgttactttaattatatctatgtacgtgcgggcgcgcatacctatataaataagcggacggcaaacgatatatggaagaacttgtttgaactgccactgatagaaactccggttgctttgtccgaagaggagtttcttgcattgccggaatttaggtcattaatagcatcgggtgagaatccggtgatacgcttagtctgccggggtgtgaagcacgtgttgtcacatcgggtcatctatgccaacctgtatgaagtggctttgcccgaagacacgaagtccttcgctaactttcagagaatacgattggaggaattggacaagtatgcgatttccaagttggtgcagaccttaattcaggtaataggtaataagtaaaaagtaggtaataagtaataagtaataggtattaagtattaaccattcggtttatagcgcagcttattacctattacccattacctattacttattacctactttttacttattacttaaaatacttgcatactattgttattctgtttaattttggcagcagatttaaataatagaatcataaacttgatacatgtatgtcagtaaataaagtgatattgataggaaacgtaggacaagatcctagggtgaaatatttcgatacaggttcggcagtggcaactttccctttggctactactgatcgtggctatacattggccaatggaacccagattcccgaaagaacggaatggcataatattgttgcatccaaccgtttggctgagattgtggacaaatatgtgcacaaaggtgacaaactgtatctggaggggaaaataagaacccgttcatatagtgatcagtcgggcgctatgcgttatatcactgagatttttgtggacaatatggaaatgttgtctccgaaaggggctaatacaggtgcgggagctcctcaaccatctgcaacacaggctcagcagccgcagcagatgcaacagccgcaacagccgcaacaacaggcgcagccgtcacaggcacagccgatacaagataatccggcagatgacttgccgttttagatactgtgataatgtgtcaataggctgatggctgattggcacattatcttttgtttaactaaaatacatactctttggactcagatggttatttaagccaattggctgaaattttcaacggtattaccgtaaacactccttcaatctctgctattatcgccatagtactggcaggtgtgctcctgcttgcttccggctttgcttcggcttctgaaatagcttttttctcactctctccttcggacttgaatgatattgacgaacacaatcatcctgctgacgaaaagatcagcgcactccttggagattccgaacggcttctggctacgatactgatcactaacaattttgtgaatgtgaccattatcatgctctgcaacttcttcttcatgaatgtattcgtgtttcattctcccttggcggagttcattatactgactgtaatcctgactttcctgttattgttgtttggagagatcatgccgaagatttattcagcacaaaagacattggcattttgccgtttctccgctccgggaatctattttctggagaaactgtttcatccggttgcttctatgctggtgcgttctaccacttttctgaataagcactttgccaagaagaatcataatatttctgtggatgaactttctcatgcattggaattgacggacaaagctgaaatttctgaggaaaataatattttggaaggaattatccgcttcggtggtgagactgtgaaagaggtgatgacatctcgtcttgatatggtcgatctggatgtccgtacccctttcaaagaagtgatgcagtgtatcattgaaaatgcttattcacgtatccctatttattccggttcgcgggataatatcaagggtgtgctatatatcaaggaccttctgccacatgtcaataagggagataatttccgttggcaatcattgattcgccctgcttattttgtgccggagacgaagatgattgatgatctgcttcgtgattttcaagcgaataagatacatattgccattgtggtggatgagtttggaggtacttccggactggtgacaatggaggatattatcgaagaaatcgtaggcgagattcatgatgaatatgacgatgaagagcgcacgtatgtagtgctgaacgatcatacatggatatttgaagcaaagacacagttgactgacttctataagattgcgaaagtcgatgaagatgaatttgaaaaggtagtaggtgacgctgatacgctggcgggcatgctgctcgaaataaaaggtgagtttccggcattgcatgagaaggtgacttatcacaattatgagtttgaggtgctggagatggatagccgccgtattctgaaggttaagttcacgattcttccgaaggagatggatgagtcggagagtaaggagtgatgagtagataagacctgttcgggcggagaaactataatcggagaagaaattataaaccaaaaacgatgggattatttctgcaacataaaacggttgatatgcagtggtctgtctggaagatggaggaatctttggatacactgtttagtcttctgcccgatgtccgaagagtttcttgtgagcaggaaatgcagcgttttacttcggaccgaaggaaactggaatggttgtctgtccgtgtgctgctatattccatgttgcaggaagataaagagataggatattcatcggaaggaaagccgcatttgacagacaattcttcttttatcagtatttcgcatacaaaggggtatgtagctgtgatacttagttccgtagctcctgtaggcattgatattgagcaatatggacagcgtgtgaaaagagtatacgatcgttttatccgttccgacgagcgagtagaaccttatcagggagatgagacttggagtatgctgttgcattggtcggcaaaggagacaatcttcaaatcaatggaaaatgctgacgctgatcttcggaaactttgtttatcacatttcattcctcagagcgaaggggtattccaggtgcgggagtatgcaacggaacggcagcaattgttcaccgtcggttatcgtatttgtccggactttgttttgacgtggactgtcactatttgaagcatatttgcatattgataaacggtgaataatgagtggaatggtccaccattattcaccgcttatctttggttacttatctttcttgttcagtctgtaacttaatgctcccgacggacatttactgatttgtgcaattagctcttccgttgtagcattctcgatttgtacccacggcctctctttcgggtggtaaacattgggtaacatttttacgcagattcctgcatgctggcacatttccggctgccatacaatggttagttcgccattggtatattcaactttttttcccatatctatacttatttaatatgaatgccacgcattacaattctcttccattccggatgtttatgaatgtatccggctacaaacggacaaagtggaactaagcgtaaaccttgtcgttcgatatccgccaatgtcttttctgcaagctgtgaaccgactcctcttcctccaagggaagcggggacttcggtatgtacaagatagatttctccattatttgatttgatatagtctatcttggctatcttgtcatcgatctgaaattcataccgatgtttctcctcattatcgattaatttataatcttctgccataactttacgtattaagtttgattataatataaacacttgaggattgattttgtttataaagaattttctgcttgcttacaaggtcattgccatttgtcttgtctacctgctatacagacaatcgttctaactgaacggtaaaatgccgcatcaagggggcttcccaagcgatgcgcacaccacgggtgatcgtttctctccgttcgaatacgtttctaagtgcggcagctattacgttcatgtgattgtccgtatataccctgcgagggatggcaaggcgaagtaaatcaaggccgttaaagcgattttcgtgagtgatagggtcacggtcggcaaggatgtaaccaatctcgcagccgcgtatgcctgcctccagataaagttcgacggttaatgtctgtgcgggaaattcttctttcgggacatgtgtcagtactttggaagcatcgacgaaaatagcatggccgccggcaggtcgttgataggggatttcgtattcgtccagtttctgggcgaggtattctacctgtttgatacgtgtttccagattatcaaattctgtgttttcgtcaagaccgatagcgagggcgttcatgtcccgtccgttcatgccgccgtaggttaagtacccttcgtattgcacgcagaaacctttggcaccttcataccattctttgcgtcgggtggcaatgaaaccgcccatgttgactatgccgtctttcttggcactcattgtcataccgtcggcaagatcgaacatttcacgggtgatttctttgattgatttgtcttgataaccttcttcacgcatcttgatgaagtaggcattctcagcaaagcgggcggagtcgaaaagtacaggtttgttgtatttatcggcgattgcacgtacttcacgcaggttttgcatggatacaggttgacctcctgcggtattgttggtaatggtaacaatgataaaaggaatgcggtcggcatattcgcttagtgctttctctaatttggcagggtctacatttcctttgaagggaatttccagttgagtattctttgcttcgtcaatcgtacagtccagtgcgatggcgtgccgtccttcgatatgtcctttggtggtatcgaaatgcgagttgccgggtactatattgccttcatgtaccagataagagaaaagaacattttctgctgcccgtccttgatgggtaggaatgatgtattcgaatcctgttattcttgtaatggtatcttttagtttgaagaaggaggtggcaccggcataactttcatcacccagcatcatgcctgcccattggcggtcgctcatggctcccgttccggagtcggtgataagatcaatataaacttgctctgatttgagttgaaagacgttataatgtgcttctttaatccattgctcgcgttcttcgcgggtactttttctgatgggttctaccatcttgattttccatgattcagcaaaaggtaattccattgtcctcgattttagatttttatccgactaaaatactgaatatgtatgagatggacaagtttttgatgactttttgtaaggatagggatgcgtaattgtttttaaagggacatggaaagagtagatgggacggagagaaaatctagaagggaatgtgtagaatctaagagatgaggtttaaaagtcaagtttgctatcatttagtactgttatccaaagtggagtgatatgcttattagagtttctatgcaccttctttcaagtcatgcggttgattgagtggacttatgcggtcgatcgtttgtaatcgagaggttgattgaggataaaccaacggtctgtttggtgcaattgaacggtctgtttggctcaaacggagggtctgtttgtggtaattagagcctctgtttgagtcaaacaataaatacctgatttttatttttcgatgagagtaaggtcatcaatgcagaaatatttaccagtattcattccaaactcgcccgagtctgaagaactaggaataagtgtgattttagaagcatctttaagaggggttaaatcaaaccatatccatgtatttactggtttatcagtatcagttttgtaatcggcaagtttaatttttgtttcagcaatttttttccctttattgtcgtatcctgtcgcagtaacctcataccaatctccttttttgaaaggtcttgcgtaactgtcaccttccgtcataccgatgtaggcatttttactagtggttatccatagacctttaatggaatattgagagtctataattgtcatagaggctgtggtattttcatcactgtagacacctaaatatacttccccggtttttatatttccacagttgggttgacaattttggaagtggctagttttgttggtgtaagtgaagcctgcgaagctatacccttgtccccagtccgagtaataatgatcgaaggttacataactttcaggatcagtgaatgtgtctttaaaatagtatcctgaaacttcggtactagttgaagtaaattcactctccgattccgttaattggttttcgaagctgacaaccacttcttttttctcattttctcctcctttattatcatcaccaccttttacttcatcattctcatcactacatccacaaaaagcgaatactgataccagtaagaataaagataactttttcatttttgctttcatttaaattattaattgttttattgattagttctcgaaatgtaaatcctctactgtcattacttccgtggaaatttctcccatccaacctacgttttgattgacagctgtatatattttcacaaaatcaattttgtctaattctacgtgattcccgttttgatcaacagcccagtctattttgaattggctgaactccgatctgttgggatgattatccgcatatccccaaggataacagtaccctacccaagtacctccttcatttattgcattgtctttcaagcgtgttccgcgaaaagtaatttcatcttcttttatccaattgggatagtaggaatcctgttgatggtaactgttgcgatagacgaacccttctcctccttgattgtcggtccagcggatatcaccattggcaggttgaggacgataataggttatttcgtaattacgggtttccgtatctttcccatattcgcttcctgccagttcataccattcatcgtccggcaatccattgccattttcatcttttgagactaagacaatgcccggttcggcacttcctcccaaagctcccgtaccggtattctgattgtatgaggcattgcctaaaattctgaagtcatattcgcctttactattacggattgactgatggaatccgactgtaatcgttcccccgaatccacctaaagaaataacagacttcttctttaatttctctgttgcacgttccaaaacctgtttggcagagaagccgtcttcgtaggcggaggttgttgtattaatgaactgtccgggggcagggatgtattcgaatactttgttggcaaaggcggaaggcgcattcggatcttccggtgtatcgcctgcctcgttctgtgaagccttgtcgctaaatactactgtattaggatttaagccgatatcatttagacgatattgaagttgcccttgttggttgaagcaaaggacatctcctttgactgtataattgtaagcctccgtgatatacacattcccgctgaaaggattcagctgaatgctgaaaggcgtttggatagccgttccgtctgtgataaagttatcccgtatgacggttcctgcattcaggtcaaatactttgatggcggaatctttagtctgatagtcgtaagtatatagataagcgatggggccgtcgatggcaaagctcagtactttttcatcatacgtagtggcgaccgcatccgttcggctgtcgattttgaccagatgatagtctccggcttcaatgtcagttcctcgtgtgactacatacacggcttcttccagccccggaagtatttttcccggattcggtccgacttctattttcttggtctccttgaaagtcgttatgtcaatcactgatactgtagtgtctacgcccggtcccgaataatccagtccgccggaattggatacatacaatttcccgttttgtacgcagatatcttccgcatttcttccgactgtgacaatctcttcgatctccagagaagtggtgtcaatccttgcgactgtgccgtcataggaacatatatatgccttatccttatcaaacgctatcgcgcggggctgacgtgaactgccattgtcgcgcaacatactgatctgccggatggatttgcccgtagggaagtcaatcacctctacggtgctcgacacattgactactacataaatcttatttccatagatcgctatgtcattggctgtatctcccagtccccgctgattgtttgcactaaagtagttgttcgtacatctttgccgattgaaagaataacgagcgagcgaactattattctgattgaacagtccttcgcttaatatgtacatctccgctgttccggtttcgaatacatccccattgctttcgggtacaatacttggcttatcttccagatcatcgcaagcgataaagaagagtgggaaaagaaaaaaacacttccccaaccgtagcaacatattatataaaagacctttctgcatacctaatacttattacttaatacctattacctaatacctgactcctatcgtcactcttaccgatcttcccggcatggggaaattcttaacgatctcataattcctgttcatcagattcagcacttccaggttgagtgatgctgtaactttctgtattttgaaatctctgtaggcagagatgctgtgatcactgtagctgtccaggcggttgtcgctgatgttttgtcctaacatataccgttttccggagaaaaggaatgaataggaaagattgagccatggagtttctattccggcttgtccggaagcggagacgcgcggagtataggctatctgatgcttgtacactttaccttccggtgagttgggattggagttggtaacgtccagtgcccgttggtaagtatagtttccggaaaggttgatccgtagtttatccagaggctggaggctgaggctggcagttgcatctatccccttgatatccactttgcccagattgaccatactccagatgaataagttcttggtaggagtggctacaatcttgtcggtcactttattatggtaggcgtctacggtagccgaaagataaggtataaagttgttgatggctttactataagtaatacctatattatattgagtagcactttccggcttcagattgatgtttccggccttgtcgtaatataaatcattgaagctgggcagacggaagatatctttgtagaagaaacggaaccgcagttcttcattatgaaacggctttagcgagatgctgacattgggagacagcttccggtggttgccggcactacctccgtttttagctttctcgttgatgacagttgccagagcagaagcggacagcgtcacccattcattgacgtatttcccggcaaaggctgtcagccatgaatagcgggtgggggagacgaagttctgcaaattggcattcatcgtattgatgcttccgtcggtggacaaggagaaagaaagattgttccatatccggtatagagcggaagcggacaggtaatattcttgctggtaatagctgttgtcagttcctccgacggaggtaagagcatccgggtcctgatagttctgataactccagttccacttggcagaggtctggaatacccattttctgctaaactctttcttgtactggctttggataaaggtgttcttatcctgcagattttgtcgggagaagtcataatataaggtagtggcattgggcagtccccgtgaggactggtaataataggctttcagtctccattgctctttgtcggagagattggcgaaagcgcttatctcagcccgaaggttttctacatccgtattccggcgcttctctttactgacctgaacatcggcatcattcccgtaacgcagggtaaatggataatgcccgtccgaagacatccattcgccgttggcggtcatgctccattttttgttgagttgttgttccagaaaaagggaagggtttactaatccccatgaaccggtcttaaattcggcggctatattagtcggcttgtcttctttgaaatgcggagtcagtgtctgtatgttcagtataccggcagaagcaaaaaaacgggcaggctggaagatgttgtcgctttgtccgttgttgagcgaaaggcggtctacgttgtttaaggagaaacgtcctatgtctacttgtccggtctggcagtcgctgacggtgatgccgtcgtaggaaacagcggtgtgttgtgccccgagacttcggatggagacggtttttaatcctccgatacctccatagtccttcacggtaactcctgcgaaatgttttaccgcatccgatacctgcagtgcctgcagattctttaattcttccttattgaaaacctgcagaggagaggctgaacggacttcacgcgtctgataagggtcggataccatgatttcggggatggagtagatatgtgctgtatccactttttgttgttgggcaaaaagggataaggacaaagcctgacagcagagtagtacgctcatctttttaataaaagtattccttctcattgttttctttcagtctgttcataatgtaaaaagatgtccgggcgaactcacttcgaccggacatcataataaacttggcagagtttattaattagtacacactttctctgaatcagaatggtgaatgaaatgatggacggattgtccggttcattagactcatcgctttttcctcgaaagcagtgaaacgagtttgcatggtaggtcttctgacttgttcctgttgcgaacgccttcccggaatttgctttccagtggctataaagtcgattgctcgcaaccaaaaaatgaacttacagcagcgggactgttcaggactttcacctgattcccttttaattgcttccctcgtgcatgagagttgcaaaccaatgcgcgacaaagatagatagtttatttgtcttttgcaagagaggagcgaaggtaaatccatgactttgaacagctttttaaaaagctttgaatccaaccacctcggttgacacttcacctatcgactcgacattcttcaaaatggcactctgtactttcacaaaatgaatacgttccagcgttacaggattgccattctggtcaacggcgtcatccaggtcaaactgattataccggtagttgccgttgtcatcctttgccatgtcgcttccccagttgtcggcatatccttttccgaaatccttgtttttccatattccgccttcttgctctgtccgtgcttcgagcatacttcctttcaatgtataggagtcctctttaatccagttcggataatacatctgatcgtgatattgagggagatacttgatgactccgctttctcctttactgtcttcccaagggatatctccggctgcatccggtctgtggtaagtgacggaatagtcgcgttccggttcgtcacttcctttcagctcgtaccatacgtcgtctgcttttccgttgccattagcgtcttcggatacccatacgatgcccggttcggaacttccggagaagggattgccgataataccgaagtcgtatcctttgcggttctttatttctttcggcattttaacggtgatgtatccgccgaaagatcccagtgagacgtagagtttcttgttgaagcgctcttctgcataagcgtttgcttcttccattgtctggcagtcgaagccttcattgataaactgccctggtgccggacgatattccagcactttgaatccttgaatttccgtttcttcctcatctttgttgcaggaagccaaaagagtggctgctatagccatcagataccaatatcttttcatttttctatgttagtttagttattgaataatatttgtgaaggaacgctctcaccacagtctactgtgtggagaacttttccatctttgctgtaaacgacgattttagattcatctttcagttcttcggtataagttacatagagttctccgctttgttggttcagctgcaatggagcagtaattgaaactcctgattctgcggcaatgaaaggtgctttgagagagtctgaatcgcctaatatatatttatatatagctccgtcggtcgataccagataaataatattctctgtttcggatgctaccatgcctatggtcggacttgaatgatacggtcccttggccggctggaagtttgcaaagactttttctaaagtaaagtcattctttatttttacgatattacatccgttatcagccgattcaagagtataaacattaccgtctttagccagtacaaaattgattttctgtttttgaatgatatctagctctgtaacggcaggagcttctccttctttagctgcgattagctcgtttacatcgtaatacttcactttggactcatctttataagtgtcattgctcagcactttgccattgtagattatgctattatagaaacaaagcagacgctcattcttgatcctgacattgttaagtgattttaggtcaatacgacgtatgccatctcctgtcactaatccatattgttcgttcagaatggtcagaccgcttaggtttgcgcctactgcagcggagttttcgtaataaagagtcttggcgtcgacaatgtagaaatgatctcggttcgatgtgctggtgcccacaagcagatagaactttccgttgctgtgaatgatatttgcagagtcgtagttaccaattcccaaagtttttcctgcatttaaagaagcataacaatcttgataagcagttttcttttcggtatcatagaaattgaatgttccgtctgctacgtagaagaatcctttggaaaagttgtggttagagctgaaacttgtgctcatttctacttttccgtatttattcttgatgatacatgtcaggtccgcgcgacatggattgtctattttgtaactaaaggtcggttcggtagaatactcttttccattgaccagccatgaataggtggctccttccggattaagcagttccggagtaatctccaacgtttctcctaattccaacacttggctttctgtcgggaaagttcctttcagtacgttcggataatgtgccagattgccgaggtgcaaatcttcgcaatcgtcgtcgttacaggcggtaaaacctgctgcaaggcaggctattaataaagtggtatatagtttattcatcttgtttcagagtcttgttattagttaaaaatgaatgtagccgggaaataatagccatcgtatgctatttctgatatcttttctcctgtggcggcgttgaatcttaccagaagatttttctgatagtctccggtcaggtacatggccagtaattcgttggtctttggattgacgcggatgcctgcgccatagaatccgtaaccttctttggtgtattcggtcagtgtctcctcaggggcgggatcgtcaaaagtggctttgtatatctttcctcctgcgatgtagtagaatattccttcaggagtgccgcagaaactggcttctctgtaagcaccgaacgaggagggagaataatcgtcacgcattgcaaccttttccagagaaaaatcagcattgattcttaccagattgtttttaccgtctttggtcgtttctacagtatagatatttccatctttacattgtacaaagcgagtaccaccataggttgcaatatctaattcctggaatgcgactttgtctgtaggcttgagatcgggtgaacataattctgcaatgtctatggtatacactttaggacttccccacccggaggagttcacatttaatatgagttttccgttataagcgattccgctacctgttccggtatacgtatttcctaccgataccagtgtaattgtttcaaacgtttttaaattgatacggctgaaatatcctccatgagtaattattccataatcgtcattcaaaccgataaactcataagcttgataattagctagtttgccacagctattttcagcatacagagttttagggtccatcaccaccaactgattatcttcttttgaacagacatacaacttcccattccacaaagtagccgattgtgaggtaactcccagcacatctccgaaattctgattcttatagcaccagtgttcaatgctgttcttctcataattatagaatgaaatacttccggatccgtgtccgaaccatccctcattgataatcagacatcctttggagtaatccgctcccggaaccatcactttattttctaatgtcacttttcccaagtcattgctgagttctaaaataactttggaacggccgggatgttcggcgttgaatgtgaatgacgggtctgtcgacatatcttctccattctgataccattgatagtatatatccagcggactacttgccttaggggcatatacatattgttctccgacattgagtgtcaaatcctcttcggggaaagtgccggctttcagagctggtaatccttgtagtttgtcaatgtggtccaggtcacaatcgtctttcgagcaagacacaataacaagcgttgttattataaataataacgttttgaatagctttttacaattcatgttttgtatattaagtaaataaaatatgtccatcaaagtgtccgggcgaaatcgcttcgaccggacacacataataaacttggcagagtctattagtttgtacatactttctctgaatcagagtgatgaatgaaatgatagacggatgtccgggtcattagattcaacgctttttcctcgaaagcagtgaaacggattttacatggcaggtcttctgacttattcctgttgcgggcgccttcccggaattttctttccagtggctttgagtagattgctcgcaacatatctatggaacttacagcagcgggactgttcaggatttacacctgattcccttttaatcgcttccctcgtgatgagagtcgcaaaccaatgcggggacaaagatatatagtttatttgtttctaccaaaaagaaaataacagcagttttgctctcatgctctaacaattcctgcgtatccctttattcatcgctgtttcaagcgtggtagcaagtgtggtggcaggtatgagagcaaacggttgctctcactccggtgcataggatgacgtgacgttttgtagtgttataggttgatttgtaggatgttaacgtctgatacgtcaactattaaagattgacatatcaactattaataattgagaaatcaggtattaaaggctgataactcatctattagtagccaataaatgagttaatgcttcttgaaagaacgggtgaattggagcaactaatgcgattgggttactccggtcatgcagtcaagttactctaattgatagttgctttagaaagttccaaagcgttgaaaccaacggtttcaagcggatgaaactctagtttcaagcagatgaaactttagtttcaaactgaagaaactttggtttcaagccgatgaaactttagttccgagcggcagaaacattttgtttcaacggttggaactgatattggaactacatgttaactattgatgctgcattagatatgcttcaatggctggtgcagtggcatctttaagcaatacagtcttgtctttatccaacagatatagagtcgggatagcctttaagtcatagacctgttcttctttgatagtgaacttcttgtcatatccgttaatccattcattgggaaattcgctcagatgctttttccactcgtccagttcctcatcggggtagatggagagaagtaccaacttcttttcctgtaaaagctggttgatgatgggagcgtttttcagaccttctatggtttctgtgcatgcctgacagccggggttattgataaataacagaagatattccgctttcaactgatataatgaaccttgtgctccggaggccagggtataagtgaagttgagcgctttggttccgatacgatttttctgagccagcttaagacgggcctggggacgtatcttctctgtttcgttcaatacaggagaggctatcattgcttccaataccggtatataaaattcttcgttgcgcatgggggagttgggatcatacagatacttgtccgccaggtcggtgatatatgtaaacaccttcttgtccacattggtccggtcgattacattgcgcatggcttgttgggctgtttcaagcggtacgtggttcagcaagtcgcaataatctgcccacgcttgttccgttacttccggatggtggatatagttggtgtcggcaaagtttacattgtcccaataatgcttggccagaaagtcggcccgttgttccggtgctgtcatcatttgcgggatggcgggcatcttaatagccttaatggtatcttgcggtgtttcgcttttgctttgacttgaagcattcccgtttttacaggcgccaagaagaaggcacagaatgagtataaggcttatgtttgttttcatgacaattggttggtttaaacttactttcggaagcaaaggtatgaaaactatgtgaaaaaacataccgatattccggtaagttttgaaaactggatatgcggcttcgtattttttatcgatacagccgactttgtgtgaatagggataaataatctcttcccttcggatggaatctgcatcgaatttgttatctttgcccgtagcattggttattttttaataaaagctgatatgaacgcacctgttaaaacgctccgtaagctcccgatagggatacaaagtttcgaatttcttcgctcggaaggatatctttatgtcgataaaacagaactggtctatcgtctcgtaacgaaagggaagccttatttcctcagtcgtccccggcgtttcgggaagagcctgttgctttccacgcttgaagcttatttcaaggggaagaaagaacttttcgaaggactcgctatcgagaaattggagcagaactggttcgaatacccggtgctgcacctaagcttgaatgctgagaaatatgacagtagggaacgattggaaagaatgcttgaactgcaactggaaagttgggaagagatgtatggagtagataaaggcacaatgacctactccggacgcttcattaccattatccgacgtgcatacgaacagaccggacgccgtgtggtcgtactcgtagacgaatatgacaaacccatgcttcagacattcgataaacctgatttgcaagaagacttccgtaaaacgctgaccgctttctatactgtactcaaagatgctgacccttatcttcagtttgtctttatcaccggagtaacgaagtttgcgcagatgggcattttcagcacgcttaaccagttgaatgatatcagctttgaccttgagtacaacaccctttgcggcatgacacgtgcggaaatcgaaaccgtttttgtgcctgaattgcaagaactggctctccagactgaaaccaattatggcgaagccgtagagcaactcacccgccagtatgacggttaccgcttcactcctgagaaaggatttactcccatgttcaatcctttcagtgtgctcaacgctcttgccaagtcgcgtttcggtgactattggtttgctagcggaacgcctacttttttggtagagatcctaaagaagacaaatttcgaccttcgcgaattggacggtattgaagtctcttccgcctccttgagcgacgacagggcgaatatctccaatcccgttccgatgatttatcaaagcggatacctgactataaagtcgttcgaccaacgttttcgtacatatacgctggggtttcctaacgaagaggtgaaatatggtttcctcaattttgtcgcccctttctatactcctgtcgcatccaccgataccaccttttatatcgggaaatttgtgcatgaactggaaacgggcgaaacggaagctttcctcactcgtctgtcctgtttcttcgccgattttccttacgaactgaatgagaaaacggaacgtcattatcaagttgtattctatctcgtcttcaaactcatggggcaattcacgcaagcggaagtccgtaccgctatcggtcgtgccgacgcagtagtaaagactgcggactacatctatgtgttcgaatttaaactcaccggcaccgccgaagacgctctgaagcagattgatgaaaaaggttaccttttgccctacactgtggatggcaggcgactggtgaaagtcggtgtgtcctttgatgccgcgaaacggaatctgggagagtggctgattgtttgactgcactgtgaataaagaaaaaccaagctgtttatttctctttcgccagcgtgaagacaaattccagtccgccgccttgattattcttggcagaaatgtttcctccgtggatgatgacggcattctttacgatggcaagccctaaaccggttccgccgagtttgcgtgaacgccctttgtccacccgatagaaacgttcgaaaaggcggttcagatgttccggagagacaccgatgcccgtatctgcgaagctgaaataatagtaattctcatcttcacggaaacagttgatgtttatctgaatattggttccggcgtatgcgatggcattgtccatcaggttacggaaaatggagtagagcagagagtaattgcctttgatctggatacccttctttagtgaatccacgatgctaatgtgcttttcttccagttccagagaaacttcattgatgatgttccctaccagtacgctgatgtctacccgttccatgtctatcatgttggcggcttcgtccatgcgggtcagtacggatatgtcgcgtagcagccggctgaggcgattgctttgtgcgtagcaccgttcgaggaacgtatttatcttgtcacgtgagatattctcgttattgacaatcgtttccagataaccttggatactgcttacgggagttttcagttcatgggcaatgttctgggttaattggcgcttcagacgtacctgctcttcttcctgcgtgacgtcattgatcgaaatctcgaagctggcgtcctgaaagatgatacattccacgataaaggtgcgtccgtttttgttgattgtgacggacatacgcttttcgtcttttccccgcgagcgttgctgctggttcttgttgatgaaatgaatgatgtctttcagttcgctgatggcgaatacttcctctgtcgtttccaggttagagtccgaaatcaggttactgtattgagtaaagaggttgttgaccagaatctcttttttgtctttggtgaatatgcccagcccttcatgcgaaatctgaagatgggtaatcagtttctcgcgttcgatgtagagtgcctctttcgtttcgtgcagacgcttgtatatctggatgatgtgctgcgaaatctctcccagctcattatgcggaaaagcggactgcatcgccatctctatcggttcgttacggtctgcacgcatggcaaactcgcggagctggctgatagaggttcccagtttgttggtgaatttgtagaagatcaccatgagcaacagcgacacaatgaccgtaaaccataagtaatgcgggtctgcctgcagattattgatgaggcttacattatatggcagtgccgagcggatgatataatctccgtagcgggttgccgaatagaaatacggtagcccggtggtctccgaggtgcggcgtacgtcaaaaccggttccgtctttcaaggctttctgaacttcggggcggttgagatggttctccagttgctggtcggtagtctgataactgtcatagatcacatttccctgcaagtcgatcagtgtgacgcgcaagtcctccaatgcgtggtcgcggatatacttttcagtcgtttcttcgatggcgggattactgttcagccgttcgtacaagcggctgttatagttctggagctgtgtgttgagtaactcgactttatattctctttcgcgttgatactggtaggcgatgaaacaaaaggcaaataccagaaacagcgagatcaccgaaaggaataacttccggctgaaagagaggaaatgtttttgcttgacaggtagattcatacttcttgattattcggcttcaaagcagtatccgtatcccaggcgggtaacgatgcacttgccatattcgccaattttcttccgtaaacgggtgatattcacatcaatggtacgatcgagtacgtatacttcgtcgctccagatgcgtgccagaatgtcttcacgggagaagacgcgtcctttgttctgcaccagcagaagcagtatttcaaattctttcttcgtcaactgcacttcttcgtcatctatgcttaccttcttcttggtgatgtcgatcacgagtgactggtaagtcaggcgttcgggcgccttttccgtctccatcgtggcggtacgcctcagtacggctttcacacgggcgatcacttcgcgcagggagaaaggcttggagatataatcgtccgctcccagattgaagcctgttacagtatcgttttcggtatctttggctgtgatgaagatgatgggcactctggctgttttcttgtctttcttcagcatgtttgccatcttgaaaccggagatttcccccatcatcacgtccagaagaatcaggtggtaactgctgatatccatcttcagagcctcttcggcggagttggcggtatccacttcataaccttcgttttcaagattgaatttcagaatctcacagaggtcttcttcatcgtcgacaactaaaatacggtaatcgttcatatgatatatgtattaatgtgatatgacaaagttaagcttttttttatttcgggacaaagatgagaagactttgttacgggcggatgaaacaaatattacaatcgtattacattccgctgaatgcgggcatcgggatgatatttgaaagtttttatgggatatgcgaggaaaaaccgtctgttatttgttatctttgtgtagcgataggataataaatacacagtttgcagatcatgataaaaatagacttgaaacgatatagacgcgaagtggtaggaggggtgattgtactgcttcttcttatcgggggaatctccgtctttaaatatacttcttttaattccggctttgagatcgtagacgatctgggaggaaatatctttccgtcggccatcctgtcggtagccactacggacgcgcaggtgattactccttcggattctacctgtctcggaaatccgaaatcgtgcatcgccgttcgggtgaagtcaaggactgcttatagccgggtgcggatagaggttgccgagacccctttcttttcccgttccgtgtcggaatttgtgctgaacaagccgaggacggaatatactatttatcccgatatcatttggaattacgaggcactgaagaataacgcacaggcggaaccggtgagcgtagccgtaaaagtggagatgaacgggaaagacttgggacaacgggtacgtacgttttcggtgcgtagcgtcaatgaatgcctgttgggttatgtggcgaacgggacgaagttttacgataccagtatcttttttgccgcatacgtcaacgaagagaatccgatgatcgaccagctgcttcgtgaagcgctgaatacccgcatcgtgaatcgtttcctgggctaccagagcacggccaaaggtgcggtagacaagcaggtgtacgcactttggaacatcttacagaaacgtaagttccgctacagttccgtatccaatacgagcctttcgagcaatgtcgttttctcgcaacgtgtccgcacctttgacgatgcgctggaatcgtcgcagatcaactgtgtggacggcagcgtactgttcgcttcgctccttcgggctatcaatatcgaaccgatactggtacgtacaccggggcatatgttcgtaggatattacaccgacaactcccataaggacatgaacttcctcgaaacgacgatgattggtgatgtagacctcgacgacttcttcccggatgaacaactggactctaccatggtcggcaaatcgcagaacgaaatgtcactgctcactttcgagaaatccaaacagtacgccaacaaaaagtacaaagacaatgaagcaggcatccattccggaaagctgaactatatgtttctggagatttccaaagaagtacggaggaaaatacagccgataggaaagtgaaattcatttttaattcgtatttttgcaaggttaatcatttaatgaaaaaggatgcaaggcaagaaatttatctcccccggaacgtggttttcgatgaattatccgtcggactggaacgagtttgaagatggcgaaggctcttttcttttctataaccccgatgtatggacgggcaactttcgtatatcagcttttaaaggcaacgcctcatatggcaaagatgccatccgtcaggaactgaaagaaaacgattcggcttcattggtgaaaatcggtacatgggactgtgcctacagtaaagaaatgtttcaggaagagggcacttattatacttctcacctgtggataacaggaaccggcaatattgcttttgaatgttctttcaccgtacccaaaggcggaagcgccaaggaagcggaagaggtcatcgctacactggaagcccgcaaggaaggcgagaaatatcccgcagaactgattcccgtccgcctatcggaaatctatcagatcaatgaaggctacgagtgggtagtatctaccgtcaaacaggaactcaaaaaagactttcagggagtggaagaggacttggagaagattcagcaagtgatagacagcggtaagatcagccccaagaagaaagatgaatggctcgccatcggtataacggtatgcgcgattctgactaacgaagtggaaggcatggagtggaaaaccttgattgacggcaatcgggaagtccccgtactcgaataccaaggccggaccatcgacccgatgaaaatcgcatggagcaaagttaaggccggccaaccctgcaacattgccgaagcatatcaatcggcaatcgatcatcactaaatcacgaaccagctaatcactaaattacgtggcagtaccttatttacaagtagacaacctgaccaagtccttcggcgacttggttctttttgaaaatatatcttttggcattgccgaggggcaacgcgtcggattaatcgccaagaacggcagcggaaaaacaaccttactgaatatcatcgccggaaaagaagggtatgacagcggaaacatcgttttccgccgtgaccttcgtgtggattatctggaacaagacccgcagtatcccgaagaactgaccgttctcgaagcctgtttccatcacggcaacagcaccgtcgaactgattaaagagtacgaacgatgtatggaaaccgaagggcatccgggactggaagatctcttggcgcgcatggaccaggagaaagcatgggaatatgaacagaaagccaagcaaattctgtcccaactgaaaatccgtaactttgaccagcgggtgaagcagctttccggcggacaactgaaacgtgttgccttagccaacgccctgatcaccgaaccagatttgctgatcctcgatgagcctaccaaccatctggacctggacatgaccgaatggctggaagattacctgcgtcgcaccaatctgagcctgctgatggtgacgcacgaccgttatttcctcgaccgtgtctgctcggagattatcgaaattgacaatcagcagatttatcaatataaaggtaactacagctattatctggagaaacgtcaggaacgcatcgaggctaaaagcgtggaaatagaacgtgccaacaacctctatcgtacggaactcgactggatgcgccggatgccgcaggcacgcggacacaaagcccgataccgtgaagatgccttctatgaactggagaaggttgccaagcaacgtttcaacaatgacaacgtaaaactggaagtaaaggcctcttatatcggaagcaagatattcgaagccgatcatctgttcaagagctacggcgacctgaagattctggatgatttttcctatatctttgcccgttatgagaagatgggaattgtagggaacaacggaacgggtaaatctacttttatcaagatattgatgggacaggtcaaacccgacagcggcacggtggatgtgggcgaaactgtccgtttcggctattactcgcaggacggccttcagttcgacgaacaaatgaaggtgattgatgtcgtgcaggatatagccgaagtgatcgaattggggaatggaaagaagctgacggcttcgcaattcctgcagcatttcctgtttactcccgaaacgcagcatagctatgtctataaactgagtgggggagagcgccgccgcctttacctgtgcacggtgctgatgcgcaatcccaacttcctcgtgcttgatgagcctaccaacgacctggacatcatcactctgaatgtgctcgaagagtatctgcagaacttcaaaggctgtgtcatagtcgtttcccacgaccgctactttatggataaggtagtagaccatctgatggtattcaacggacagggagatatccgtgacttccccggaaactatagcgattaccgtgactggaaagaagccaaggcacagaaagaaaaggaagcggaaaagccgcaggaagagaagaccgcccgtgtccgtctgaacgataagcggaaaatgagcttcaaggaaaagcgtgagttcgaacaactggaaaaagaaatagcggaactggaagcggagaaggcacagattgaagaactgctttgcagcggaatgctttctgtagacgaactgactgaaaagtcgaaacgtctgcccgaagtgaatgatctgattgacgaaaagaccatgcgctggctggaactgagcgagatagaaggctgacatgaatctgaacggaaagaaactgtaataactgaaacaacctgataataaccgaaataacatagaccgatatgacaaacctgaccaattaccatagtcactgcttatattgtgacggacgagctaatatggaagattttatccgttttgccattagtgaaggcttttcttcttatggcatttcttctcacgctcctctgccattttctacagcatggacgatggagtgggaccggatggatgattacctttccgaatttgctcgtctgaaggagaaatatgccgataaaatagagcttgccatcggactcgaaatagactatctgaatgaagagagccatcccgctatccctcgttttcaggaattgccgctcgattatcggattggttctgtgcatatgctctattctccgcagggcaaagtcgtggatatcgatacccctgccgatatattccgtcaattgatagatgcgcattttgaaggtgatctcgattacgttgttcgcctttattataagaatctgctccgtatggtcgagctgggaggttttgatatccttggtcatgcagataagatgcactataatgcctcttgctatcgtccgggattattggacgaaccgtggtatgatgcgttggttcgcgattattttgcagaaatagcccgtcatggatatatcgttgaaattaataccaagtcttatcatgatttgggaactttctatccgaacgaacgctatttccctttattgaaagaattgggtattcgggtacaggtgaatagtgatgcccattatccggaacggattaataacagtcgtgccgaagcattggcagccttgaagaaagtcggttttgacacagtagtggagtggcacggcggacagtggaaagatatgcctctgttacaataaaacagagcttctgtttataataaatgcaggctccgtcaactgctgacagagcctgcatttatctataacagagcctctgtttcgatcccctattccgtccttttgcaggcattcgataacaggaactcattcaaagcttcttcataattcccatgaatcataatatgatgattgcctagcgggtttttcaggaaataatccgccggagtattcatgcggatacgcacctgcgtgcggcacatattgatataattcgtattctcggttagagttccggtagacaggtaatactcatccagacattcgcctccgcattttacgatagtcacgtcacctgtcgggagcagtccttgaatggcgatacctttctctgtctcaaaatgattgcggataatatatctttccgtctgtttgagtcctatagtgcaatgtgccagtattaattcattggttcgcgtattgatggtggatggatttgccatgaatccttcttttcctgtcagcgccttaactgccagaagagtgaagatagactggagatctccctcacagcctgccatgataccgtcatcattcagcaatgacaatgccagacagccggtcgtatcaatttgatcgatcagtttgaagcagcttaatgtcagcgcttccagcttctcttcttcgcaaattctcttgatggccctgtataatcgcattgctttgattaaatcctcgggagttccctcgcggcaggcaagcgcctgcgaagcaacggcggcgcaggacgcgcctacctgatcatctgtgatttgtttaaaatgttcataaaccctttccagcggaatatctatatattcgattccccaacggcgttttgccagaagataatccacattgctggcaaccagccacgaagaaggagtaccgatgactccgatacgcttgccgaacaaagaacgctgcgcgcggaaattattatatagtatatgtacacgttgaataatagacggtaattctccatgaagaatttcactcttcattccccttccacggagccatgtagatatttccaatgccgcagcaagtgagttctgcatgccatcggccaataaaatggcggggcggggaagacgttcgaagtgctggatgaccagtctttccacacctccggtagcgataaaaatgattttgaaatcatcactgcccaacttatccatatcttgataatcgatgagtttgacagtgtaatatttttcaagttcactcagaattgcttcgtgcgaattgcgcagcgaggcttgtttgtgaagtattgaagcaaatgagataaggtgtatggtcattatgatattgttttaagttttccgtattacaaatgtatagctttcttttcatttttccactacgtttttacccttgataaggattttaaagtttttatgtctctgtattcaaattattgcgtacatttgcagttccaaattaaaaaagtaaatagtaattagtaatttgtagttaaaattatgccaaccatatccattcgcggaaacgagatgcctgcatctcctatcagaaaactggctcctttggcagacgctgccaagcaacggggagtccatgtgtttcacctgaacatcggacagcctgacctgcccactcctcaggccgcgattgacgcgatacgcaacatcgaccgtaaagtgctggaatatagccccagtgccggaaacagaagctatcgcgagaaacttgtgggatattatgcaaagttcaacatcaacctgacggctgacgatataatcattacatcgggaggttcggaagcggtacttttttccttcctttcctgcctgaatccgggagatgaaatcattgttccggaacctgcatacgccaactacatggcatttgccatctctgccggagcaaagatacgtacgattgcaacgacgattgaagaaggtttctccctgccgaaagtagagaaattcgaagaactgatcaatgaacgtaccaaggctatcctgatttgtaatccgaacaacccgaccggttatctgtatacacgtcgggaaatgaatcagatccgtgacctggtgaagaagtacgacctcttcctcttctctgacgaagtatatcgtgaatttatttataccggctctccttatatctctgcctgtcatctggaaggtatcgagaataatgtagtgctgatcgattcagtttccaagcgttattcggagtgcggaatccgtatcggtgcattgattaccaagaacaaagagatacgtgacgctgttatgaaattctgtcaggctcgtctgagtcctcctttgatcggacagattgccgccgaggcttctttggatgctccggaggaatattcgcgtgagacgtatgatgaatacgtagaacggcgtaaatgcttgattgatggattgaaccgtattccgggcgtttattctccgattccgatgggggctttctataccgtagccaaactccccgtagacgactcggacaagttctgtgcatggtgtctttctgactttgaatacgaaggccagaccgtatttatggcaccggcttccggtttctatactactccgggctccggcatcaatgaagtgcgtatcgcctacgtattgaagaaagaagatttgacccgtgcgcttttcatcctgcaaaaggcgttggaggtgtatccgggaagaacggaataggaaataagtattaagtaataggtattaagtattaaccgtagacgctggttggcgtatgagatattataagattgataatatatcataaggtaatgacttaatacttaatataacacttaatacttaatctctaaataagctacggctaatacttaatacctattacttaatacttaaaagaattgtcgttatctctttttatagcccgtcgtatttatcgcgagagcgatggtggaaaacaggtttcacgtcctgcggtcctcattgctatggctggtattgccatagggttggctgttatgattattgcggtggcggtagtcatagggtttaaaagtgaggtaaggaataaagtcatcgggttcgggtcgcacattcagatagcgaatctggatgcggtcaattcttatgagactcatccgattgcggtgggggacagtatgatgactgctcttgccggttatccccaagtaagccatgtgcaacgttattctaccaagccggggatgataaaaacggatgatgcttttcagggaatggtactgaaaggtgtcggaccggagtttgatccgagttttatgcaggagtatctggtggaaggggagattcctgcgttcagcgattcggcttcgagtaatcaggtacttatctccaaggcgctggctaccaaaatgaagctgaagctgggagataagatatatacctattatattcaggataatatccgtgcccggcgcttgacgattgcaggcatttatcagaccaatttctcggagtatgataatctgtttctgctgactgacctttatttggtgaaccgtctgaatggctgggaaccggagcaggtgagcggagtggagctgcaggtgcgcgactatgataaactggaagatatcacttacgagatagccgttgatacggatagccagcgtgataagtttggaggcgtgtattatgtacgcaatatagagcaactgaatccccagatatttgaatggctcaatctgcttgatctgaatgtatgggtaatccttttcctgatgataggagttgccggctttaccatgatttccggtttgctgattattatcatagaacgcaccaatatgatcggaatactgaaagcgctgggagccgataattttacgattcgcaagactttcctttggtttgccgtctttctcatcggcaaggggatgctttggggcaatgcgattggactggcattctgttttatccagtcccaattcggaatatttaagctcgatccggagaattattatgttgatacggtatcggtttctttcaatgtctggttcttccttttgatcaatgcaggtacgttgctggcatcggttctgatgctgatcggaccttcttacttgataacgaagatcaatcctgcaagctccatgcggtacgagtaatcttctctttttcttttctttttttgctgcaaaaataatttagaccgtagcgtgatgtagagtgaataatatgtctatatttgcgcccgatttacttaatatcctcttgtaggtttaatttttaaccattatgaataatgtgttaattctgttggataatccggatgactggaagccgtattgtgagacgaaaagtatcctgactgtttccgactatctgaagaacaagccggttgaaaaagaccggaagttagttattaatcttagcaatgattacagctataactccgaagggtattactgttcgttgcttgcccagacgagaggacaacgggtgattcccgatgttgacatcatcaacaaactggagacggggacaggaatccgcatggaccgaagtctgcaggcgttgtgttatcaatggattcagaagaacgggatcaaaagtgatatctggtatctgaatatctatttcgggaaatgccgtgagaaagggctggaaagagtggcccgcttcattttcgagaactatccctgccctttgttgagagtcgctctgaacactcatccgaagaatcagattgaaagtattcagttcttgcctttgaaccggttggatgatgaggaacaggacttctttgccaatacgctggataactttaataagaaaatatggcgtgcgcctaagtcggcaaaagctccgagatatagcttggcggtactgatcgatccgaaagagaaatttccgcccagcaacaaaggcgctttgcataaactctccgaggtggccaagaagatgaatatccacgtcgaaatgattacagaggatgatgccatgcgtctgttggaatttgatgcgctgtttatccggacaacgacatcgctgaatcattatacattccatttgtcacagttggccgcccagaatgggatggtcgtcattgatgatccgttgtctatcattcggtgtaccaataaggtttatctgaaagaactttttgagaaagaaaggattccggcaccgaagtctacgttgatttttcagtccaatgagaactcgttcgaacagatcagtgagcaggttggtgctccttttatcttgaagataccggacggttcctattccattggcatgaaaaaggtgtccaatgaagaagaactgaaaacaagtcttgaacttcttttcgagaagtcggctatcttgttggcgcaggcatttacgcctacggagtttgactggcgtgtcggtctgctgaacggagtacctttgtatgcctgcaagtattatatggcaaaaggtcattggcagatttactgccattatgattcgggcaggagccgctgcggactggtggatacgattcctatctatcaggtgccgcgtgtggtactggatatggcgataaaggctgccaatctcatcggaaaaggcttgtatggagtggatttgaagatggtcgatgataaggcttacgtgattgaaatcaacgataatccgagtatcgaccatgaactggaagatgcgattatcggtgacgaaatgtattaccgtctgttgaatcactttgagcaggcgctggaaatgaaacattattaatgatggaaccaacgatacacctccgtcaggcaaaagcgggagacattcctgccattctggagatagagcaggaatgttttcaggaagatagtttttcgagagaacagtttgtttatctgatctgccgttcaaagggcaccttttatgtggtggtggaacaggagcggataatcgcctatgtctcattattgtttcatgcgggaactcgttatctgcgaatatattcgatagccgtccatccggactgcagaggaaggaagctgggacagttgctcatggagcggacgattgagacagctcttgactgtagggcggtaaagattacgctcgaagtaaaagagtcgaatacgcctgccatcaagctatatatgaaaaatggctttattcccgtgggagtaaagccaaactattatcatgatggttcggatgcgatttatatgcagcggcacatgtaatcagcagttgcctatcttctcataaagtctcctttcctgcgtaaggagcggtaaagtttgaatttgagcgactggatgggctggaggatatcgaaaaccggcagggagaaataatatttcctgtctccgcccatttctttggctgtccgattaatgatgattgcctgtacggtatagcggaacagccagatcagtaatgcaattccggcagccagccaatggttgttgaggatgccgaatacaagacccgcgatgcaggcagcgtaaaacagcagatgggagaaagtctcgaatcctaacaaatagcgctgtacaccgtgataaaagcgtgcggttgccatatagcttatcttttcttctttccattctttgtagctgtataccggttgtatccgcatagttgcattgatatccgtttctacacgtgtgttggatggggtggctatctggttgatgaataaatcatcttccccgcgttgcaggttcagataagtggaatagccttttctctggaagaataattctttccggtaagccatattgcggccgatgcccatgtatggctttcctgccagtgcaaagcataaataacgcagagactggaataacgtgtcaaaggctacccgtttgtgcagccatcctttggtccggtcgtaaccgctgtatcccagtactatctgagtctgtgaagtgaagttacgtgccattagtctgagccagtctttgcttgcaggcatacagtttgtttctgtaaataccagccagtcgtgtttgctggccttgatgcccaatgtcagggcaagtttcttatgactgatgtagcgtgcgctgtcgggagtgaagctgtggtagaggtgaggatatttctcttccataaatcccagtacatcctctgtctcatccgtagaagcatcgttgataacaatcacttcgaactgcggatagtcttgttcgagaatggcaggtaagattttacgtaggttatcagcttcgttgcgtgcacaaagaatcacggaaagcggaggcatctcttgtgtgaagtgcactgcttctttgcgtacagccttattgtgggcatgtatccgattgtacaagccgaaataataaatgagctgaatgataaaaagaatacctgccgccgataaaagaatcagttcgacagtattgaatgtaaatgcttccattggatataagtgtcgtttttacgactgcaaaagtacgtatttttttggtagctccgtcatctcgcaggaaggttatttcgtaaatccagatattctttcttgaacatgtcgacgaatagaaagaataatgaaagcagcaacggaccgaagatgactcccataaatccgaacaacggcaaaccgataacgactccgaatatcgtaatcagcggatgggtatccgccattttcttctgcaggatgaatcggatcaggttatccgactgagatatgactattccaccgtatgcggcgagtccgatagcgttgaaccagtctccggttacggcaagataggcagctacgggaaaccatatcaaggcagttcctaccattggaatgatggtggcgaagcaggtcaggaatcccaataccaggacattgggtgctccgaagataagataccctatcatggcgacccctccttgaataatggctaacagaggtatgccgatggcattggaacgtacaatcatattgatttcgtgaattacttcctgtgtattcgcttcattgaacgggagaatgtcattcacataagcttccatcttttttcctcctatcagcataaagtatagtacgaataccatgacaaacagattgatggcaaggctgctgatgctttccattattatttgtccgatgcggggtaggatggagacaatgaatgacaaggtatcttttcccagcacatcataacccgttttttctttgataaactctgccacctgctgcatcggggcaatgaatgtttgcgggtccagattgatgtcctgaagttggtttaccagtagccagattgtcagtccaagcggaaccaaaaataccataaccgtctctgccgtaatcagcaatgcggcaacactgcgtttcagtttccacttttctgtcaggtgcgtcatttgtgtgcgtaccaaaatataaatagtgagtgctcccagcaatcctcccaaaaaaggagtgatctgacggaagatgatgattcccataaatagtatgatgacgatgagggaatatttccagtattgttctttgatgctcatattatgtatttagatattctgctttataaacaaaagaacagtggaaaaagtttgaatgtccggtatgaggtttacgtatgttgtttttaagggagctcaatatgaaaaaccgtttttccggctctgctttctttgatagccaaatgcccttcgtggcggcggataatttctttgcacaggctcagtccgatgcctgtaccttctgatttagtcgtaaaaaaggggatgaatactttgtccataatttcgggaggaataccgggaccattgtcggtgatgtctatgactatatattcgtcttgttctgcttgcagggaaagctctccatgcggatgcccctccaatgcctgcatggcgtttttcaacagattgagaaacacttgtgacagttgcttttcgtctccttcggtcatcatcggttcgggggagcaccggagtgtaaaggagatattgttttcttgaaaattggtttgaagcagttcctccagattgtgtaataagtcggatagggaaaagagacgcttttcgggctgcggaagataggacagatgccggaaagattcggtaaattccatcagccgttcgctttgcgcctgaataatgtgaagcccgcggattcctttctcgctgatttccggataggaagccagtgtctgagacagtgagataatgggagcgatcgtgttcatgatctcatgagtcaggacatgactgagtttgctccatgattcactttcgttttcgttgagccggtcgtcaatgtcttgtatggaaagcaaggtgattgtttcgtcttgtagtttcatctgactttgggagaggctgagtctttttctgttcttctcattctgcaggatattttccagttgggaatatagagtcagtgattcgatgtttagtaaggtcaacgctgtgttgttgacgaagattattttcttggagttgttccaggctatgattccgttgggtactttctccagcagagaccggtagaaatgttcctgtttctggtagtccattttggtttgtgccaatagggcgttgatccggttcagtgaacggttcagctgttgttgctcttcgtttattccttgctcggggtagctgaatgtattatctctgtcctcgatggcatcaaagaaaagccggagtttccggttgatgttattgagataagtgactattccgccgatttgaaacaaggagcagatgattagtaacataccgatgatgatgccacgttgggagatgatgagccacagccctgttcccgaagttgcgaggatgagcaggatacgaagcaatatggtccaatagatatgtcggctgaatatcatcttgttcagggtttgaatcgtttcagtttattatagagagtttgtcggctgatgcctaattgttcggcggcggctgtcagatttccattgttttggaggattgctgtttcgatggcttgccgttctacttcctccagattggggacgacgcttgccgtctgaggtttccagctttgctttaccagaatatctttggggcgtatcacgttgccttcgcataagatcaccgctttttcgatggcgtgttgcagttcgcggatattgcccggccagtgataggagcgtagtttctcaatcgtttgctcgtgcatccgtatgtccggccgttgatatttggaagtaaaacgacggaggaaagtatctatgaataataggatatcgtctccccgttcccttaaaggagggatttccagatgaatggtgttgatacggtagaacaaatcttcccgaaacagtccttgctttaccatttccggaatatctttattggtagcagagatcagccggatatcaacgggaatcactttgttacttccgattcgggtgacattccggttctgtagtacagtcaatagtttggcttgcagtgcaatggaaaggtttccgatttcgtccataaagagggaactgccgttggccgcttcgaattttcccggacgactttcgtatgcgtcggtaaacgctccgcgttcgtgtccgaacagttcactttcgaagagtgattcactgatagcgcccatatcaatgccaagcatttgacgggaatttcggggagataaacgatgtatctctttggctaacatctcttttcctgttccgttctctcctgtgatcaggatgttggcgtcggttttggctactttcgtgaccactttaatcaactggagcattgcgggagagtggccgatcaacatttccggtttgctcggtttctcggtatccccctgtttgccggttgtctttgaagcgcttttggctttgctgttgttacttttataagcctcctttatcttccgaatcagaatctgattatcccaaggtttgagtaaaaaatcagtagccccgttttttagtgcttttaccgccaattcaacgtctccgtaagcagtcagcataaccaccggtaaagatgggcggatttcgtggatttgttttaaccagtacagtccttcattgccattgtttatgccggcagagaaattcatgtcaaggataacgacgtcgatagaggtggtagtcagtaacgtggtgatttgattgggattggcggcggtgcgaactgtaccgaactcattttcgagcagtaactccagtgaagctaacacgcttttattatcatctactattaaaatagttccgttttccatatctaagattgggggtatctatcaggttgaaccatgctttaagtttgggggtaaagatattcgtttttgctttcctctgcaagcgagtgtccaataattagacgttttcgggcatatttactgcaaggcttacttaaatgcccgaaaattgctcccgaagaatatgaaataatggataacgtccaaaagttggacgttgcggtgtgtaataattggacggatgcaatgcaatcgtattggtcatttggctaataatcaattacttaaaaattgtggcatcctatttgccttctaatcatcgtaacacacaatcgcatatattataaagaatgaaaaaccttttctttttgtccttattcttattaccgcattttgtgcaggcccagtccggcatgactttggatgagtgcattcgtctggcatggaagcagaatccttctgtgcggaacagtgtgatagatataaaggaggcacgggcagattatatggctgctgtcggtgcttttcttccccgtgcagcggttaatgcagaaacagggaaacgctttgggcgttctatcgatccggatacgaacggatataccaacgaaacttttgaagaagggactgtggggcttgatatgactctttctctttttgagggcttttcacgcattcatcaggtacgcttccggaagatgaataaggagcgtagcgaatgggcattgaaaaataagcagaatgaactggcatatcaagtgacggatgcttattataaactgattctggagagaaaactgctgaatcttgctttagaacaaagccggttgagtgagcggtatttgaaacaaaccgaagcctttgttgagttgggattgaaatcagcttccgatttgcaggaagtcaaggcccgcagagaaggggatatctatcgttataaatctcgtgagaatacttgccggttggccttattgcatctggaacagctaatgaatttccaacccggtgatacactcgttattcaggatactattgtggaagcgaatcagttgcccttgctttctgttccgtctacggaaacactttatacccaatcactggaaatacttcccgtcatgcgtatgattgatttgaaacgaaaggctgcccgtaaagagtatgcgatggctggcggaactttttctccttctgtctatgcccgctttacggttggttccaatttttacaatacagttttttctgctagacagttgcgggacaatataggaaaatatgtcggcatcggtatttcgtttcctttgctgagcggattggaacgtctgactcatcaacggaagcagaaactaaacctgtatcgcttgaagaatgaagaagaactggaaaagcagcagctatataccgatatagagcaaacacttctttccctacatgccggatttagtgaacatcaacaggcattgcaacagcttgaagcagaagctctcgtactgaaagagtccgaacgtaaatgggaggaagggctcatttccgtctttcagctgatggaagcccgtaaccgttttatctccgccaaggcagaactggttcgtgtacgcctgcaagtggaaatgatgaggaaactggagaaatactatcgggaggggactttcctgtaaaacggagtctgtgccatcggatcaatcatttaataacaaccctattttgaatatacctttatggatacacctgttgaacgcaaacccggcataaatcgcaaacacctttatacgatcggtggtgtggcgctgggaatcgctgtcattttatattttatttttagagatacggcttcctccatgacagttgagaaagaccgtctcacgattgctaccgtcaagcaagcggagttcaatgattatatccgtgtgatcgggcaagtgatgcccaaccggattatctatatggatgccatagaaggcggtcgtgtggaagaacgtctgaaagaagaaggagctatggtgaaagcgggcgatgtgattctgcgtctcagcaacccgttgctgaatatcggaatcatgcagagtgaggcagaccttgcctatcaggaaaatgaattgcgcaatacccgcatcagtatggagcaggagcgtctgcaactgaaacaggaacgcataggcttgaataaagaactgacattgaaaaaacgccgttatgaacaatacagacgtttggtggaggagcaactgattgcccgcgaggatttccgtcaggcagaggaggagtatgaagctgccaaagaacaactggcggtcattgacgaacgtatccgtcaggacaatattttccgtgaaagccagatcagcagtctggacgagaacatacgtaacatgaaacgcagtcttacgttggtccgtgagcgcttggaaaacctgaagattaaagctccgattgacggacaggtaggaaacttgaatgcgcaggtcggacagtccatttccgcaggagaacatatcggccagattattactccggacctcaaagtacaggcacagatagacgagcattatgtggagcgtgtacttcccggacttcctgccgactttacccgtgacggaggaacctataaactggaagtaaccaaaccttatccggaagtgaaagaagggcagttccgtactgacctggctttcatttcggagcggccggagaatatacgtgccggacaaacttatcatatcaaccttcagttaggagacccggcacaagcgatccttgttccccgtggcggattctttcaaattaccggagggcggtggatgtatattgtcgatgaaagtggtaaatttgccacgcggcgtcctgtgaagatcgggcgccagaatccacagtattatgaggtgacggaaggtttgtcttcgggtgagaaagtaatcatatccggttatgagttgttcggagacaatgagaaactaatactaaaataaataaaaagaatcaccatgattaaaacagaaaaactgtctatgcttttcactacggaagaggtgcagacgaaagcattgaacgaagtcaccttacacgtagaacaaggagaatttgttgctataatgggaccttccggatgcggcaagtcaacgttgctgaatattctgggcacgttggattctcccacttccggctcttatttctttgaagggaaacaggtggataaaatgaacgagaaccagctgactgcccttcggaagaataatctgggctttatcttccagagtttcaacctgattgacgaactgacggtatacgaaaatgtggaactcccgcttgtctatatggggattaagactgcccaacgcaaagagaaagtgaacaaagtgctggagaaagtaaatctgctacatcgtgccaaccattatcctcaacagttgtcgggcggacaacagcaacgtgtggccattgcccgtgcggtagtgacggactgtaagttgttgctggctgacgaaccgaccggaaatctggattcggtgaatggcgtggaagtgatggagctgttgagcgaactgaaccgccaggggactacgattatcattgtcacccactctcaaagggatgcgacgtatgcgcatcggattatccggttgttggacggacagattgtatccgaaaacatcaaccgtccgttagaaaaaagtacgtcctctaaaaacgaagctgtatgataggaaattattggaatagtgcctatcggaatctgatgaagcggaagaagttcagcttcattaatgtgtttggactggcgatcggcatggcatcggcgttactgattctgacgtatgtaacttttgagttcagttttgacaagatgcacacgaaatatccccatatttaccgtgtgcaaagtacattccgcgaaggggaggtgctgaccgataactgggcaagcagctctttcggatacggctcggcaatgaaagagaatcttgcgggaattgaagattatacccgaatcggctctctgctccaacctgaacagattgtgaagtatggtgagttgatactgcgggaaaaccagatagcttatgccgatccgggctttttccgtcttttcgatttcgagcttttgaaaggtgataaaaagaccagcctttcgatgccgggacaagtcgtaatcaccgagcgcattgcccgcaaatatttcaaagaggaagaccctatcggaaagattcttatctttaccggtccctattataagatatcgtgtgaagtgaccggagtcatggaggaaatgccttccaattcccatatacattataacttcctgatttcgtatacatctctgcccaagtttatacatgaatactggtataagcatgaagcatatacgtatgttctgctcgattcgccggagagggaagcggaaatagaaagagagtttcccgtcatggcggaaaagtacaagacggaggaagcgttgaaaaacaaaacatggggagtcgatttggttcctctggcagatatacatctcactccgcaattgggttatgaaatggagacaaaaggaaatcgttctgccatgattgcacttgtctttgcagccattgccattctggctattgcctggataaactatatcaatctgacagtagcccgttcgatggagcgtgccagggaagtcggagtgcgtcgggtagtgggtgctttccgcaagcagttgattcatcagttcctgttcgaagcgctggttatgaatctgattgcttttatattggcggtaggactgatagagctgattcttccgtactttaatcaactggtgggacgtacggtcactttctccgtttggctgatggattattggtggatgctgctggttcttgtttttatcgcagggatattcctttccggatattatccggcattggctttgctgaaccgtaaaccgattaccctgttgaaaggaaagtttttgcatagcaagtccggagaacggactcgtcaggtgttggttatcattcaatatacggcctctatgatactgctttgtggaacattgatcgtgtttgcacagctgaattttatgcgcagccaatcattaggggtgaaaaccgaccagacattagtcattaaatttcccggacgtacagacgggctgaatgtgaagctggaagcgatgaagaaagcgataatgcggttgccactggtgcatagtgtcgcagcttccggtgctgtgccgggcgaggaggtggctactttcctttccaatcgccgtaccaatgacgctttgaagcagaatcggctttatgagatgctggcctgcgatccggattatatagaggcatatggtttgcaagtgatagccggacggggcttttcagaagagtacggagacgatgtagataaactggtgattaatgagacggccgtacgcaatctgggctttgcttccaatgatgaggcgataggagagttggtaacagtagaatgtaccgatgctccgatgcagattatcggagtggtcaaagattatcatcagcaggcgttgagtaagaattatactcctattatgctgattcataaagataagatagactggttgccacaacgctatatttctatcgtaatgacttccggcaatccccgcgaactggtatcgcaggtacaggaaatatggaatcggtactttgctgattccagtttcgattattttttcctcgatcagttcttcgaccatcagtatcgtcaggatgaagtattcggggtgatgataggttctttcaccggattagcgatattcatatcctgtctgggactttgggtattggtgatgttttcctgttccacccgtacgaaagagatgggtatacgtaaagtcttgggagcttcccgctggaatcttttctatcagttggtcaaaggatttttcctgctgattctgatagcggttgtgattgctcttccggtagcctggttcagtatgaacgcctggttgagtcattatgctttccggacggatttagaagcctggttctttattgtgcccgtattgttgatgttgttcatttcattcgtgacggtggcctttcagacaatgaaaataataatgagcaaacctgctcgttcgttaagatatgaatagtttttagatcactccttcgggtattcgttaatatccggaggaattatgttaaatgttaacgagtctgctacttctattaaaccatgttataagatgctccgctttgctccggaaatttggagatatgcagaaagtccgtatctttgtagtgtgtttttcatagtattagatttaaggttaacaaaaagattggctgtctgggatagatagcctttttttatgccctttttttcgtatatttgagggacataaaaccagaatgaatattagagaacaatcttattaattctgttactttctgttgcggcaatatcgtcatttgcccagacaaatacttatcgggaatgtacaagtcagaattttaaaataatctcatatacacgggagctttctccccaaggatgccagcaatctccgatatatgtgaagcccaagcgttcgtaatacgaagtatgactggtgcttaaatataatttcgagaatccgaatttcagtgtatccttcttggcttgttctattaaaagattggcgtaatgatttcccctatacttttcttcaatgaataaggcaaccagccaaggatataaatccgcgcgagagttaaaatcgttgctggtaagtcccgcacatcctattatttcatcaccattcattaaaaggtaccattgaggaatgggattttcggcattcagagaatgtctgaaacaattgtcatacaccattttcgtgttctcgttaccccacttgctttggaaataggcgatagctctttccagatactgaggtgagtctctgagtgaaactagattcatacgtttattgtattgtttatatttaatattgccaaagttataaaagtatttttgaaaaccaataggttgcctgttttatctgactaattctgtatatttgcaagtatgtcctgcttattaaataacatcataatatatatatggagaataaagaattgcgtgaaagaatgctttcgggaaaaatgtataatgacttgtctgtagaactggttcaaagaagagaacaggctgttttcctgaccaatgattataattccacttatggaaagcctaaagaagttcgggaggcattgttacgtaaactattgaggtgtattggcagtagtgttcattttgaaccgaatttccggtgtgagtttggattcaatatcagtattggcaataatttcttcgccaattttgattgcatcatgttggacggaaatctcattacgataggcgacaatgtattattagggccccgtgtcggtttatatacggccaatcatgcgctcgatccgcaggaacgtcttatgggcgggtgctatgcccatccgattgtcattgaagataatgtatgggtaggtgccggcgttcatataatgggtggtgtcactgtcgggagaaattcagtaatcggtgcgggcagtgtggtgacaaagagcattccggagaatgtaattgccgcaggtgttccctgtaaagttattcgggaaataaccgatgaagacaagaccggttttctgccttagtgttttacggatgaactagctcgctacttactgaaatttaaggatcgtttcacaatcctttgtcccgcaatatgcgaaagattattcgtctgacagttgttgaactttcgtctgacagctgtttctttttcgtctaacaactgtcagacgaaagttcaacaactgtcagatgaatacttttatgtaatttcaatgctagagtttagcaaagtcgtccataagtttccttgattttgtcctaactatattccttttgtttattgctgattaccataatttgcaatctatccattccagtttatcgaatagccataattcaaaaaagaacaagataaatgggaggataatgatgaaggtcatagtcactccactacttttcgagtgtcggtaatgattgataatagctttttttctgtctttacggtaacggaaaaatatgaaaatgtaaggcaataaaagaatcagtacttgataaaatatgaccgcattgtctccaaagtgatgggttacactcgtgaatccaaatgccggaaaagctacgatcattatccaatactccagtaaaatgaatgcaccggagcatctgaaggctttcttgctccattgttcacccttaaaatacagataatcgaagaaataatatctgtatttgggaggatgtaatctttgttttacgcgttcgaaataattatctgttttattcgtaccttttttcatttaattgattaataggaattacatattacaacttactcgacgtatttagtaagtctctctgtttaaaaaagaattgagccatttttgagagaattcttcttgctcacgagtattcggaaattcttgaatctctgcataatcaaatatcgttgcgatatctttttttaatgcaggttttccaagagtcaggatatataccttattggaggtactcatcattcccgattgatgagcatttattattatggggtgtataccttatttatatcatacttttccatacatttgtttgttttggatcactgataatggctaagcggggaacgctgtaagcgttatcctgcttcgttagtaatttttttctgttgtgaattattaagacgttgaactaacatcttcttgaactctgtactattacattcatttataagttctctatattcaagagattttatttctgaatacacagactctattaaatgtagtaatgtccattctatcccatataaagcagtcggcggaaagagcttgattaaaatatgtgcttcatccaaagtgacaggtttaactatcttgcctaataagtctgcatattcatcaactaatgcagccgttattcgttcatctgcttcatcgggcattgcacccattaaagctaattgttcaacttcttttctcataacaatgttgttactaatgaataaataatcacactcgacgagtagaggttatttcagtaaccgatactataaggcgaggttactgaattctattttctaattcgatatatgctactgacaaagttatgaaactattaatgaaaaacaatctagcgtccattttattttatttacatgacagacattgtgataatatgtatatattagccattcactgaaaaaatgaccttttcttaaaaagaggatatttacacaggcactaaagaccgtaattacatatcacttatcaaggagaatagaatatctccgtcatttgtaaatacgaaattctatctttatgtaattggaagtgttcttagagtaaaatggtaaccatttcctgttaatacttatcatttagatggattaattaaggaaggtactccgttctgtcattttctattttatcggtatttatgatgaactagagaaaaaacgagcaaaaacagcctttttataacttcctcactgatgaaaaacaagttcattagtaagggacggagcgttggttttaaaggaacaccccgttcctttaaaaccaaagagtactgaatgactaaaaaaagatgcatatttcatacagtattatgcaggatgaactcgtattcctgcatattattgcactaatttatgcaggatatgctgtcgttcatgactttttgagcaaattcctattggcataatattaaatttggaacatttagactgaaaggacatttatcttatcaattccacatcttgtctacaaatgaggcgtgttcgtctcatttgaaaaaccagcaatgtagtatcccttatcttcgtgtcgaaataaaaaacagaataagtcatgaagatgaataaaactatgttgttaggggaagtagcaaaccgttcggggattccggcagatgaatgcggagtagtacttaaaacttttgaaagagtcctttgcgaagaactcacacggaaactgtaccgttatggaggatggatattgctgttgatcggtttgtttatatcagcctttgctttcgggcaaatatcggatcggaaagggcgtccggtccagaccattcgtgggatggttgttgacggagattccaaatatcctataccgtatgcgacagttagattgtcagataaagaggggatggggacgacaaccgacagtctgggacgtttcaccattccgcaggttcccgtcgggagacatacggtagaggcagcgttcatgggatatgaacccggcattttcagagaaatactggtgacttccgccaaagaagtctatttggaaatacctttgaaagaaagcgtcaacgaactaagtgaagtagtggtccgtgcgcggacgaacaaagaagaagcgatgaataagatggcaactaccggagcacgtatgctgagcgtggaggaagcgagccgttatgcaggcggattcgacgatcctgcacgtctggtttccgcttttgccggagtggcgcccagcgtctcttcgaatggaatttcgattcatggcaatgcacctcatctgttgcaatggaggctggaggatgtagaaatcccgaatccgaatcactttgcggatattgccaccttgggtggaggaatcctttcttcccttagctcacaggtacttggaaattccgatttcttcaccggagcttttccggctgaatatggaaatgcagtgtccggcgtgttcgacatgaagctgcgcaacggtaacaatcaaaagaacgaaaacacgatccaagtgggaatcatgggaattgacgttgcttccgaaggtcctttgagcaagaagcataaagcctcgtatatctttaattatcgttattctaccacaggattactgaatcttgacggtggaacgatggactatcaggacctgaacttcaaactgaactttcccacaaagatggccgggactttctcggtatggggaaccagcctgattgacaaatttaagagtgacatggagaggaaccctgagaaatgggaatatctgggcgaccgcagcgaatcacgtgacaagcagtatatggctgccggaggtatcagtcaccgttactttttcaatagtgacgcatcgctgaaaacaaccgttgccgctacctactcgcagttggacggaggcgcttccatgttcaatcatgcgttggaatcgactccttatatggaccttgaatcaaggcataccaacctgatactgaccagcaccttcaaccgtaaattcagtaaccgctttaccaataagacaggattcacttatactgccatgttttatgacatgaaccttgccatagctccatacgaagctcagctgctggaaacggtatcgaagggagatggcaatacgagtctgatttctgcttacaatagttcttctgtcggactgagtgaccgttggactctcaatgccggtatctacggacaatacctgacgctgaataataaatggtctgtcgaaccccgtgccggactgaaatggcaggctaccccaaaagcgacctttgctttagcttacggcatatacagccggatggagaaaatggacgtctactttgtgaaaacgaagagcacgggaaatcaatccgtcaacaagaacctcaacttcaccaaggcgcagcacatcatgttgtctttcggctacaagatttcggaccgcatgaatctgaaaatagaaccatatgtacagttcctgcacgatgtaccggtaatggcggacagttcctattccgtactcaaccgctccgacttttatgtagaagatgcgcttgtcaacaaaggaagaggccggaatatcgggattgacataaccctcgaacgcttcctggaaaaaggactttattacatgatctccggttcgttgttcgactcccgttaccgtggcggagacggtgtatggtacaacacgaagtttaaccgcaactatgtcatcaacggactgatcggcaaggagtggatgttgggacgcaacaaacagaatattcttagcatcaacctgaaactgaccttgcagggcggcgaccgctattccccgattgacatggaagcaaccatgaagcatccggacaaggaagtgcagtacgatgaaaggaaggcattctccaaacagtattcgcccatgttgatcggcaattataccgtcagctaccgcatcaacaagaaaaaagtatctcatgaatttgctgtgaagggcttgaattttatgggcacgaaagagcactacggacatgagtataacgtgaaaaccggaaagatagatgcaaccgacggctctaccgtcctgactaatgtgagttataagcttgaattttagatatccggtatagagaccataacggaaaatgttttatcttcgtacccaatgaagcatatggcaactgaaacaactgcagcaggcaacgaatcggcctttttatatagattgctcgtaagtacggcattccgatggatgcggtatctgatacttgtcatggtgttgggtactatctccttcaatcaggtcttcatcatttttatggactatcgggatatactgggcgtatggatttatgtgttcacgtttatatatatgctcacatacgttggcgttatttgtctgaaccttttctggttattcccgaaatatttgttgaaaaggcattatatgacctatctgtcggtgctgtctgtggcaatggtcattgcgctgctgatacagatggtcatagaataccttgcttactcccattggccgcagcttcatgcgcggggatcgtatttctcggttcccatgctgatggactacatttcttcttttatgctgtcaacgctttgcatgataggaggaacgatgactttgcttctgaaagaatggatgattgagaatcagcgtgtttcacagatggaaaaggcgcacgtactgtccgaagtggaacagctcaaagagcaggtcagccccgaacttcttttcaaaacgttgcatcattcgggtgaactgacattgaccgagccggaaaaggcttcgaagatgttgatgaagctgagccagttgctgcgctatcagttatatgattgcagccggcaaaaagtattgctcagtagtgaaatcgccttccttaccaactatctgacattggagcaaagctcccttccgcaattccgctatcagtttactgcggaaggggaggtaaacaggatgctggttcctcctctgctcttcattccttttgtgcagcatatcatggagttggcgcacgaacagcaaaccttgcttcctgtctctctggacattcatctgaaagcggagaagggtacgattgtattcacttgtatgtgtcggcaacttaatctctccgtaaacagggggctggaacggatcagacaaaggctggacttattgtatggcgaccgctacggactatctttgactacggaatgtataagactggaactgaatggaggggaacaatgagaataagtacaaacgataaaaatacgctcgacaggaatcccggtgacggaaccatgaacagcagaagtgtcaccgtttttctgctgagtcctcattgcaggatatacagacatatcctcttgcaggtggctgttctgctgattacaatcaatgttttttggtacgagcctttgcaggtggtctctctcttgaaacgctttggaggctgtctggtctatttcttgtctatgaatgcggtgatatataccaatctgtacgtcctggttccttcttttctgctaaagaaccgtttgggtggttatgttctggctgcgatagtaaccaacttagtggtcatctttttcctttcagttacgcagggaatgctttttgaagttattttgcctgtcaggaatcccgatggatttgccactttcatcaacaccttttcggggatactcactatgggctttgtcaccgcaggttcggcagctatttcattgttcactcattggctgcgtcataatctgcgcattgatcagctggaatctactactttgcaatcggaactgaagttccttaagagccagattaatccgcactttctgttcaatatgctgaacaacgccaatgtactgataaagcggaatccggaagaagcttccaaagttcttttcaaactggaagatttgctgcggtaccagataaatgacagttcgcgcgaaagggttgctttagcctcggatatccgttttctgaacgattatctgaatctggaaaagatacgccgggatcattttcagtttacaatggagcaggaaggggacattgactccatctggattcagccgttattgtttatcccgtttgtggagaacgcggtaaagcatagttttgatagcgaacatccttcgtatgtacatctttcttttaaggtagaagagaaccggttggagttccgttgtgaaaatacgatgccggcggttgctgtcagcaacaaggtaggaggaatcgggcttgcgaatattcagcgtagattaggattgttatatcccgaccgttatgaattggagcagatagagaatgaaaatcggtatatggtaactttatgtataacgttatgaattgtattattgtagacgatgaaccattggcacgggaggctatgaaattgctgatagaggaggcggaatgtcttcagctggtgggaagttttaacagtgccgccacggcttccgactttatggagcagcacgtagtagaccttgtctttctggatattcaaatgcccggcattacgggaattgagtttgcccgtaccatttccaaacggacattggtaatctttaccactgcctatacggagtatgcactggatagctacgaagtggacgcaatagattatctgataaagccggtggaggcggagcgctttcagaaggcggttgagaaggcgcagtcttatcattctttattattacaggaggaaaaggaagccattgaaacgattgtggctgccgagtatttctttgtaaaggcggaacgcagatacttcaaggtcaacttctctgatatcctttttgtagaaggtttgaaagattatgtaattctacagttgggcgaacaacgcatcatcacccgtatgagtctgaaagcggtctttgacttgttgccgaaggactcttttttacgggtcaataaatcgtatatagtcaatacagcccatatcgattcgttcgacaataatgatatatttatcaagtcgtatgagattgctatcgggaatagttatcgggatgacttctttgaaggattcgtgatgaaacaacaaagatggtgacaggtcttgcgatgttttttatgtcatatatatccgttagtctttaatctgatgcaatattggtagataaaggaaagtttataaaagaatctgccctctgtcagtcattagaatgctgatagagggtagttgcatatcaagaaaaaatcgaaattagtttatttagcttcgttattctgtttcaaaagaaattcgtcgattgctttcttcaactggtctttgggcaaagccccttgcgtgattctcggttcttctttcatcggaatcagtaacagggtggggatactgcggataccgaatgcggcagccagttccttttcctggtccacatcaatctgatagatgtctaccttaccgctgtattctttgctcagttcttccagaacaggatgcagcgctttacacggtccgcaccatgttgcatagaaatcgacgattgccggacgtttgccttcaaatttccaatcattcggattggcttcaaaatcatataccttctttaaaaactctgctttatttaatgatactacttccattttattgtcctcctttgttggttcattactctttttattttctccgccatttcccgcacaagctgtggtggccagtacgatagcgaaagcgctcataatgcttttaatcagtttcataaatcttttcggtttatttgtttctatgttgcaaaggtaaggcgaaatagcttcccgtgaaatagcgatttgactggaacacttggcaaaatttcccatcactgctcctttaacgctaaaaaatgtctttttatctttggaagtaataaaaatatgcactacttttgtcgcgataaaatgagtattcaccctttaaaatgatggaaagggtattaattatgttggagctataatattttcaaattaggactaagttgtctcgtcgggaagacggggctttgcgacattttgttttttacgtttaccgcaactctgctgctggcggtaatagttgattagtcctgcaatcacattttttatttttcaaattattcacttcaatgctgtggatggatgttttatatccgtatccgaagcattggcataccgtgtataaccttactttccgctgttgaggcggacggggtgtggtatgcgaacagaaaaaaagtatgggaatacgattaaaagatttaagtaaactgggatatcgggataatgtagcccgtagtctggtagtagacattgtaggcaaatattgcaaacatgacacgaaggaacagattgcaatgactttgagcaatatactcgaacatcccgaatcttataaaaacaatgaaatatggagtaagctggcggaacgcctgtcgcctactgttcttgcgaaagagttcgtagcttacgacttacgggaagatccgttgatgtataaaacctatggaggtaagtttatcgagactcttgccaaacaacagatgaatctggctatgcgcctgcctgtaacggtcggcggagcgttgatgcccgatgcgcacgccggttatggattgcctatcggtggggtactggctactgataatgccgtgataccgtatgctgtcggggttgatatcggttgccggatgagtctgacggtatttgatgcgaaagcagacttcctgaaacgatattcttatcagataaaggaggctttgaaagactttacacatttcggaatggatggcggcctgggctttgaacaggagcatgaagtgctggatcgggaagaatttcggttgactcctttattaaaggatttgcagggaaaggccgtgcggcaactcggaagctccggaggtgggaatcactttgtggagttcggcgaaattgctttgcaggcggataatgtgctgaatcttccggaggggagttatgttgctttgctgtctcattccggttcacgtggcttgggtgctgctattgccaaacattacagtctgttggcccgtgaagtctgcaaacttcctcgggaggcacagcattttgcatggctgagcctgaactccgaagaagggcaggagtattggatgagtatgaatctggcaggagactatgcccgtgcctgtcacgagcgtattcacttgaatctgtctaaagcattgggactgaaacctgttgcgaatgtcaacaaccatcacaactttgcgtggaaagaggagatagctccgggacgtatggcgattgtgcatcgcaaaggggcaactcctgcacaaaagggacaggcgggtctgattcccggaagtatggctacggcaggttatctggtttgtggcaaaggggtggaagaatccttgtgctctgcttctcatggagccggaagagcgatgtcccggcaaaaagcaaaggagagtttcactcagtcggctttgaaaaagatgctgtcgcaggcagacgtgacattgataggcggaagtatcgaggaaatgcctctggcatataaagacatcgatcgggtgatgtacacgcaggagactttggtggaagtgcagggtagatttatgcctcgcatcgtacgaatgaataaagaataaggcgatgaaggagaaagtctatttacagataacttccggcaggggacctacggaatgttgccgggtggtggcattggtactcgaaagaatagtaagacaggcgcaggcaagcggactgaaagtggaaatgatagaacgtgaagtgggaccggtcaaccggacactgctttcggctaccattgctcttcaaggcacagcgagcggagaactggcggatgaatgggagggaacggtgcaatggattgcccaaagcccgtatcgcatttatcacaagcggaaaaactggtttgtcggtgtgcattcgtttgtgttgtcggagagtcaggaggctacagaaagagatttccgctatgaaaccttacgggcttccggtccgggcgggcagcatgtcaacaagacagagtccgcggtccgtgccgttcacatcccgtccgggatgagtgtggtagcttccgaccaacgttcacaatggcagaacaagaagctggcaacggaacgcctgttggtgaaactttcgtcatggacgatggaacaggcgatgattcaggcgcaggaaaactggagtaatcataatcatcttcaacgggggaatcccgtgaaggtgattcgggaaccgctgatttagctgtgagtaataaaaaatatataaagtgactaaaaagtcggttctatctcccattcccctcccttcgggaaggaagggtggctgaaagccggggtggtaggtggatgcatagattgatgataatcaaagttatatgcttacctaccacctccccctgcggggactcctccttcccgaaggaggagagtttgaggttactaccgattttttagttcgcctttatgtatgcaggataatgtcactatatcaaggcgataatgtcattatcctgttattattctttcgggtggttaactgaaaatataaacgataattcctgtaatcaccacatatgccagtgcatacgggatagcagctttcagtatttccccttcctttccctgctggtttccggcagaagtcgcaatggcgatactttgcggagaaataatcttaccgcctgtcgcacctaccgtatttgctgctgacagccagtccggactgacatgaatctgtcctgccacacttgcctgtaactttccgaaaaggatgttggaggaggtatcacttcctgtaataaatgtccccaggcagccgatgaccggagcaaacagcggatacaagcttccggtagcagtagccagtgccgtagcgatgacagcaatcattcccgaagtatccataatggtggataaccccacgagacagatcacggtaataaaggttttctttaattgcttcaccgtattccaaagaacgataaacagctctttgactttggcaccctgtatcaacccaccgataaaagtaccgaggaagagtagtacacctgcatgggtcaaccacgagattgtatagtttacggtagtagcattgacaggcagactgattcttgtaacccagttattctccaatgtacttctcaaactcgggaaaagcggactggtgaggatgatcaggaacaaaatcagtaaatagatgctccacgcattcagtatatctttggttttcagcgtacttttccgaggcttttcttctttcgatgcggtcagttttccatagagaacgatgacaatgatagaaagaatacttccgataatggcaggcgattctgcccccatatatctggcagccagatattgtccgaccaaagaaacacctccgaccagcagggccagaaatatattcttcgggagtgctttcagtttaggattggtgaggaaaagcaagaccagcggaatcagaaacatgagtaccgataattgcaatacaacgttcgtactgagttgtagcacatccagattcgtttcctttgccaacaccaataccggagttccgatagcaccgaaagccgtagcgacactgttggctatcagactgacagtcgccgaaaatatcggcttgaatcccagactgataagaatcgccgccggaatagcaaccgccgttccgaatcctgccatcgcttccagtaatcctccgaatccccaagtcagcagcaatacctgaatgcttttatccgtagagatggaggcgaactgttgcttgataatctccatcttttccgttttcagcaatacgttataactgaaaatagccatcagaatgatgattaaaataggagagaccgctttcagcgctccatataaaaaggaataaaacagattgtctacagaaaaggcgaaaccgaaaagagcgatcagcatggttacaatcaacgagataatactgctcttgtcaccggacatcttgaagaacgccatcaatacaattaatagtaataccggaataatagcaaggattagtgtcataattctaaattttaaatagtcaacttctggtgaatatttaatataacaaaacaaaaggtagttttgatggatatgtgactctaattttatccaacttcttttggtgaatgtgtcaaaaatatatttaggcacggatttcacagattaacacggttttaagagttaagtaacccaaaaccgtgaaatccgtgtaatccgtgcctgaaaaatcgttttaagtgacttccgtcccttctgctacttcttgctcattttcatattcatgatctgttgcaactgtttcaagtttgcctgagcagcttcattccctaatttggcagcttgttcaaaggctgctgtagcacgttgaatatctccgtttaagaagttatacacgcctgtattattcagaaattcggcagtggtatgatccgctttttccatatatttcaatgcggtattgatatccttctgtgacagggcgacagccgctgcattcagattggctacggcatcggccggatacatacgtacggcaatatcaaatacatctacaaagtccttgctgcctttcggataactattggctacctgatacatctcgttcagactcagatatttcggattttcacggatgatgatacgtccttgttccacatcgaagttgaccactgtgtagtcgattttgcagtttactttacgcagtcccggataaatctctttcagcatagtgcgataaggagcgccgccgccgactttcatgatttcctgtttacgtttcacgtcattcgttgtatttttgatgatattcaggaaggtttccttatccttcatcgaagaggattcgagagctttcaccagtccgtcccagttctctccgccgaaagtcactttatacagtttggcagatgccttttcgttcttgaccagataatctttcagagcttccgcacgttttttagagagttgctcgttgaaagccagcggtccttcgggggaagcgaatccttcgatgctgatgctttgtacggtcagattcttgtcattctggattttatcaaacatagaatgaatattcaccagttcggagtgattgttcatgaagtcggtaaggatgacagacttgttgacggggaagtccagatgagcttcgtattgctcactgcggtttttcaccacttccaccgtaggctggatgtaggctacgataggagacatggcactcagtcgtttggcttcggtagatacgtcgttcgttatcagttcctgcgcgttcatttcctgatagttgccgcatccgcacaggttctctacaagttgcagggaagcatttgccatccacggctgataaggaatgacctgcgtataattaaacgtttctcttttgttataaggtacgatgatagccgtgggttcctgcttgctgatcgccagtccgcgtagataggctttctcgcgtcttttgccgttgacgataatctcctgtagcgggacattatgttgtccgtccgtcagcagcgggatcaggctgaggctgcgtgccgagccgatggtcaggtttgccatgtcgaccgtcatgccgatataaagcgagtttccttgttgccataaggatacattcgagagcgtgagtgcatcattcagaaatttctgtgcatgagccggaagtatggtggctgcaagagctataaatagatagataagttttcttttcatcattgtaagttttaaaaagttcgattatttgatgacataaatgaagctgaggccgattttggtagggccgaaatagttgcgggtgttgtgcccgagtttttcgcctccgtcaccgcgggcatatttatcatatttcagacgggcgtaaccgactccgatggttgcttccatgctccagcgtttgctgatgatccactggtatccgtaagagatgccggctccgtacagactgccgtcatagcggtcgtgccccattccgaatatgttcagattgctgacattcatttctccgtagtgtccgtgcagaccgaagaaacttccgttgaaacgttcgcagagccagtagcgcaattccggttgtacgagccagtgcttgatctggcggtcgtcgccaaacttccacggattgtagttgccggatacatcgagggtgattttctttgccagtccgacttcgaatcccaggttgggagtgctcgtagcccagtagagggcattggtcttgatggcgaatttgggtagataggtttcattccgttgtacttgcgcatacgcgcttgtacccaatacgagcaggaaaccggctgctaataaaagtttaattgttctcatttttgttagggtctaggttttattaaaatgatatgcgataaacacatgattgtgtgactttgttgtgtaaacccgtagaaaagattccttgcccgtatccgccataaagatgtttaagggcataaatgctaacaaattcggcaaatgatacgtttactatataaaaatacctttgtgtaatcaatatgacaactaattaatttattactgactatttttacacataacattaatacaaacagcctatgaaagagcttatcaagaatctggaagaactgaacaggaaagcagaaaaaggtggcggggatgcccgtattgagaaacagcactctgtgggcaagctgaccgcccgtgaacgcattgacttacttctggaaaaggggtcgtttatcgaacttgataaactggtgacccaccggtgtaccgacttcggtatggaaaaacagaaattctccggtgacggggtagtgactggttacggaatgatcggcaaacggctggtctatgtttttgcacaggactttaccgtattcggaggggctctttcggagacacacgccaagaagatttgcaaagtgatggacatggcgatgcagatgggagcgcctattatcggactcaatgattccggtggtgcgcgcattcaggaaggcgtccgttctttggcagggtatgcagagattttccttcgcaattccatggcttcgggagtcattccgcagatcagtgccatcatgggcccgtgtgccggtggtgccgtttattctcctgcactgaccgattttattctgatggtcaagaactccggctatatgtttattaccggaccggacgtagtcaagagtgtgacacaggaagaagtaagcaaggaagatctgggtggagtgggcattcacatgacaaagtccggcgttgcgcatctgtcggccgaaaatgatattgaatgtatcaattacatccgcgaacttatttcttatctgccgggcaacaatatggaagagcctcctttcgttgtcaccaacgactcgccgacccgcttgacacccgaactgtccgacttggtgcctaccaatccgaatcaaccttataatataaaggagatgatagaagcggtggccgacgataataacttttttgaacttcaggcagaatttgccgcgaacattgtcaccggatatatccgtctgaacggaaagacgattggggtggtagccaatcagccgctggtgctggcagggacgctggacatcaatgcctctataaaggctgcccgcttcgtccgcttctgcgatgctttcaatatacctctgctgactctggtcgatgttccgggattccttccgggagtagatcaggaatatggcggaatcatccgtaacggcgcgaagttgctttatgcttactgcgaagctaccgtgccgaaagtgaccgttatcacccgtaaggcttacggaggcgcttatgatgtgatgagttccaagcatatccgtggcgatgtcaatctggctttccccacagccgaaatcgctgtgatgggaccggacggggcagtaaatatcctgttcaagaaagagatcgaaaagtcacagactcccgaagaaaggcgaaaggaacttcagagcgattatcgtgaaaagtttgccaacccttaccgcgcggcggaactgggctatgtggatgaagtgatcgatccggccgttacccgtctgcgtctgatacgcagtttcgaaatgctggccaacaaacgtcagtccaatccgcctaagaaacactctaacattccactttaataaatggaaaatggaaagttgaaagttgaaaatggagagtgatcaattaaaagaaacagattatgataaagaaaatattagttgctaatcgtggagagatagccatgcgcatcttccgtacttgccgggtgatgaatatttcgacggtggctgtttacacgcatgtagacaggggggctttgcacgttcgctatgcggaggaggcttattgcatctccaattcgccggaggatacttcttatttgaagccggggttgatactggccattgccaaaaagaccggagccgccattcatccgggatatgggttcttgtcggagaatgccgactttgcccgtcgttgcgaagaagaaggagtgatctttatcggtcccggtgccgatattatagctaagatggggatcaagactgaggcacgcaaaatcatgcgtgaagcggggctgcccatcgttcccggaacggaaactcccgtgcaggggatcgaagaagtgaagaaggttgctaaggaagtaggttatcctattatgttgaaagcgcttgccggaggaggcggaaaggggatgcgtctggtccgttccgaagaagaagcggagacggctcttcgtctgtctcagtccgaggcgggtacttctttcggtaatgatgcggtctatatagagaaatatatcgagaatccgcaccatatcgaggtgcagattatgggagataaatatggcaatgtggttcatctgggcgagcgtgaatgttccattcagcgacgtaatcagaaggtgatcgaggagtctccgtcaccgtttgtgaaagacgaaacccgtaagaagatgctgaaagtagccgtagaggcttgcaagcggatcggttattacagtgccggcacgctggagttcatgatggataaagaccagaacttctatttccttgaaatgaatacccgtttgcaggtagagcatccggtgacggaggaatgtaccggcgtcgatctggtgcgtgacatgatcacggtggctgcgggcaatccgttgccgtataagcaggaagatataaaattcagcggagctgccatcgaatgccgtatctatgccgaagatccggagaataactttatgccgtctcccggagtgataaccgttcgtgaagctcccgaaggccgtaatctccgtctggacagtgccgcctatgccggattcgaagtttccctgcactatgacccgatgattgccaagctctgttgctgggggcgtacccgcgaatccgccatctccaacatggcacgtgccttgcgtgagtataagattctgggcatcaagacgacgattcctttccatcagcgtgtgttgaagaatgccgctttcctcgaaggaaaatatgatacgactttcatcgacacccgttttgacaaggaagacttgaagcgtcggcagaataccgacccgactgttgccgtgatcgctgccgccgtcaggcattacgagcgggagaaagaagctgcatcccgtgccaccacgctccctgtagtgggcgaatctctctggaagtattatggcaagttgcagatgactgccaataattattgaataagtggagagttgaaaattgaaagttaagttggtcatttattaaaattagaaagatatgggtacatcgttagcgacttattatgccaagcttctggatatgccggacagtgaatataaggtagagattctggaagacggaccgatcaagaagatagcggtcaacggtaaaatatatgaggtcgattacaatatgggaggcgactccattcattcgatcatcatcgatcatcactcgcatggagtgcagatttccccttcttccaataattcttataccatcatgaataagggagagctttatcagatagagctacagggagagatggaaaagatacacaatgcccgtgccggtacggaagccgtagggcgtcaggtagtacaggcgccgatgccgggggtgatcctgaaaatatacgtgaagaagggagacgaagtcaagcgtggagacccgctttgcgtattggtggccatgaaaatggaaaacgagattcgttctgttaccgacggagtagtgaaagaagtctttgtcgaagacggtatgaaggtcggtttgaacgaccggattatggtgattgaatgattcttgaaaaaataaaggtgttttacgtacttatctcaaaagttttctttacttttggcagataagtacgtatttatatccggatgtcttatgaacaacgaacaaacaaaagaagcactgaaagaggaattggagttgcttagaaaagaaaatgagcaactgaagcgacaacttcgatctctggaacagaataaacaacccgaagaaagctccaccagctttcaggaaaggtatgccgttaaaatattaaattccttaccggatatgctgactgtgttcaaccacgacgaagtgggaattgaagtcgtatccaatgaagaaaccaatcatgtcgggatatccaacaaagattttgaaggaatgcacatgcgccagatggtgcctcccgaagcctatcagaacatccatgccaatatgcagaaagtgatcgccacgcggactgtttcggcagcgcatcacgacatggatttcaatggctctcaccattactacgagaaccggatttttccgttggatgaagaatacgttctgatcatgtgtcgtgacatcacggagagagtggccactcagcaacagctggagatatttaaaagcgtactcgacaaagtcagtgacagcattcttgccgtttccagtgacggaacgctggtatatgccaacaagcaatttatggaagagtacggtgtcacccagcagatgggtacccagaaaatatacgacctgcccgtctctatgcgcacgccggagttatgggaagccaaactgaaagatatacgcgataatggcggcagcttttcataccgtgcagcgtatgtgcgcaaaggtgaggagaaaaacagagtacaccaagtctctacctaccttacacaggaggatgatacggagcttatctggttttttacgcaggacattaccgatgtaataaagaagcgggatgaacttcgtgaattgaatctcctgctggacggtattctgaataatatccctgtctatctgtatgtgaaagatcccgaggacgatttcagatatctgtattggaacaaggcatttgccgaacattccaagattcctgcctcccgggcaatcggccgaacagactttgagatctttccggagcgtgcagatgccgaaaggttccgcagggatgatttggaattgattcggacgcatgaacggatcgatatgcaggagacctacgtggcggccaccggcgagacccgtattgtgcagacactgaaagcgcttgtcccgatggaagggcgcgaaccgcttctgatcggtatctcctgggatatcactaactttcagaatatcgagcaggaactgattaaggcacgcatcaaggcagagcaatccgacagattaaaaaccgcctttcttgcaaatatgagccatgaaatccggacaccgctgaatgcgattgtcggtttctccaatctgttgccttctgcagaaacccttgaagaagaaaaactctattcgagcattatcaatcagaactcagagatcctgttgcagctgattaatgacatcttggacttgtctaagatagaagccggtacattggaatacgtcagacagccgatgaacctgggtgaaatatgtcggaatatctatcagattcataaggatcgtgtgcaggaaggggttatccttattctggataatcaagacgaagacctgattattgaagaagaccggaaccgcattgcgcaggttatcactaacttcctcaccaatgccggtaaattcacgctttccggtgaaatccgctttggctttaaagtcaataatcaatgtatccgtttttatgtgaaggatacaggtatcggaatagctcccgataaggtgggacatattttcgaccgttttgtcaaattgaactcatttgcgcaggggacaggtctcggacttgccatctgccggatgatcatagaaaagataggaggggagatcggagccacttcggaaataggcaaaggatcgactttctactttacgataccttataaagaaagctcagatgaccgtattgcattttccgaggcttcggaaacgaaatacatcagccacaccatcaagaggatgcagaagatcaagaagattctggtagctgaagatgtggacagcaactttgtactgatcaagaatatgattggcaaagattacactctgctatgggcgaaagatggctttgaggcggtggaaatgtataaacagttccagccggatttgattctgatggatatcaagatgcctcgtatgggtggactggaggctactcgcatcattcgttcctattcgaaggagattcctgtcattgcgctgactgcctatgctttcgaagcggacaaggagcaggctttggaagccggctgcaatgactttgtcacgaagccggtttcaaaagcagcattggaagaggcgttggggaagtgttgcgggtagtaactacaagtgattatattatactcactttcctatttcgggaactaataagaactttgtttccggaaagtacttttcgagccaagttcgtataaactccatcgtatcatcttgaattgttttatcctctaccgtcggatagagattataaagtactgtatccagcacaatgtcccgtttctgtatggcttcaagactcagaagagtatgattgatgctgcctagctttccggaagtcacgaagataagcggatatttctcctgtgcgatatattcaattgtcaggagctccgtagtcagaggaaccatcagaccgcccgcgccttcaagcagaacacagtcataccgttcgcttaatacttcggtggcatgcttgatcttgtcgaaatcgatgggacgatgatccagtcgggaagccagatggggggaggcgggataagaaaagatctccggcatggtcagtccttcctgatcttcccgggtgaaagggatttccataatgcgccgatgcaggtctatatcttcggaatgccccacatttcctgtctggataaacttctgcgtaatggttcttttgccgtttttattccattcgcgtgccaggtagccggtcgcgtaacttttaccggcatcggtatcgataccgcttacaaaatatacattctgtttcatacttttttcttttttgctatgatataaatagggtgatatgtcagggacactgaagtgccctgtgtaaattcttgtgtgtaacgttcgcaaaaatgctgcaaatctcgacgggtccaagtctgtttttcgtgcttcggatagagggatgattgcgctgacaaaccattcacccccgtctgcttcagatgatacagcactttcatcggatcttcgaaagaaagggggatcaattcttcttctgagtacagtatatcaaagtggaacgacaaggctgcttcaagctcttcctttgaacgatagggcaacccctttccggtaagctcacgtatctccttcatattctttttcccaaaagtactgaaagcaaagtatccctgactgtggagcaatgtattacaccttttgaagaactcctccggcgactcgaaccattgcaaagcggaacaggaagtaattaacgtacttttatccggaaaaggaatcgtctccgcatctccggaaagaaaagagacttgtttctctcttaataaatcttcgcagcaatacctcatttccggacataagtcattcagaagcaactcttccggacgaagggtgcggagcaacattcgggagtaaatgcccgtcccgcatccgaactcgatcactttcggacagggagagggaatatgtttctgaagcaggtggatcattttatctgctatctgccgttgtacatttgcctcacggggataggtggagatggcttttgagaaacgttctgcaataattgtcttattcattgatcaatgattatttaatgttcatgattacctcattaaaaagctcctgctgataatgggcagcttcgacgtgcaggagggagtctgccttgttgctccatgcctgctcttgatggtccggaaggaaaatccggtcgttatctccgatgatggctgtctgccagacaaactccgaagggagggatgacaggtattgctgccggatggcggcaagctcttctttcagttcttcaaccggacgtttgggagccattgtctgaaaaaccttgtaatcagcagcggaaccacacattcttcgctgaaatttcagtagggtttgttcattcagtccttgcagggtgccttcaaaaacggatggcgtgattccttccgtttcgtgtatcggataaagtgttccgttgatggcggtactttgggaaacaggcagggagggatattgcttcattacctgcgaagccgcccagactcccatcgaccatgcgatcagcgtaatcttggaatatgcctgtatcaaagtcgtatcgaactccagcgaacgataatcgtaacaaatcatccagtcacattccgccggatggatatgtcggaaaggcgtttcgtccattccccatcctgcgaagaatagtagaaggtgctttccattgttcctgataataaaagtctgtttcatccgttaatgatttctataagtgtatcgatttctttttctgtgatgtccgctgtcaatgagaagcggatacgggaagtcccttcgggtactgtaggcgggcgtaccggcagggcatagaatcccttgcgttgcaattcttcggccttcttgatagtatcttcgcttgctccgaccaccatcggcacgatgtggctgacggaaggacagttgtatcccttctcggtcagtgcttctttcagtttccggctgatttgcagcagatgctcccttttgctccggaaatcggcgaagtgtttcagtacccatgcggtccactggatattgacaggaggaagggctgtcgtgaagataaaggtacgcatcttattgatcagatattcccggatggtctgccggcagacgatatatgcgccggcggatgctgccgccttcccgaatgttcctaccagaaagtcgatgtcgttgatgcagttttgttcttcggcacatcctaagcctttctcgccccgtgctccgaaagcgtgggcttcgtctacatagagaagaaggttggagtaatcgtgtttcaatcgtaccagcgcttgcaggtcggcttcgtctccgtccatactgaagatactctcggtaacgatgatcatcttctcatacataccgtggttttcttcaagaagacgccggagctgggctaagtcattgtgccggtatcggatacatttggcagatgataatctgattccgtctatcaggctggcatgtacgagtttgtccgcaaggatcaatgtacgggcatcactgacggcaggaagtatccctgtgttggcgtggtatccgctattgaacagaagggcgctttctgctccgaacatagtggccagttgctgttccagttcctgataggcagtgaaattgcctgtcagcaggcgggaggaagaggaagtgggcagaaaggtttccggagtgatggtctttaagaacgcttctcttaaagacacctcattggctaaccccagataatcattggatgataagttcagcatccgtcgtccgtctactgtcacgtctcttccgtcatgaatcaactgtgggagggaacggtaattcttcttctcttttaaagtcagaagttcttgattgatggtttctaaaatcataatctattcatttatacaataaatttaggcacggatgacacggattaggcattgtgattgcgcaaagcaaccgtgttatccgtgtaatccgtgcctaaccttttgagaagatcgttgagttacatctctctgactattttaagtactccggaagtcagtttgcttaattgctccggagagatgatgaacgggggcatcaggtagactagttttccgaacggacgtacccagataccttcttctacgaagcggcgttgcatatatgccatgctcaccgaacgttctgtctggatgactcctatggctcctaatatccgtacatccgctacttgcggaaacttgcgggcgggagccagttcttcttttaactgagcttcgattcgtttcacattctctgcccagccggagtcgagcagcaaccggacagaagcacacgccaccgcacacgcgagcggattccccataaaggtaggaccgtgcataaaagcctttggggcatgattggagatggtatctgctatctgattgcttgccaatacggcagacagtgtcatgtatcctccggtcagcgcctttccgatgcacatgatgtccggttccactccggcgtgttcccaggcaaagagtttgccggtgcgtccgaatcctgtggctatttcgtcaaagatcaggaggatatcgtgttctttgcagagtttttccgcttcacgcagatactgcgggtgataaaaccacataccgcctgctccctgaacaatgggttcgaggatgagcgccgccagttctttagagtgtttctctatcgtttcccgcagggggatgatgtcgtccggattccattctccgtcaaatcgcgaagagggggccggaacgaaatatcggacaggaagcgatgaaccgaaaagactgtgcatcccggtaacgggatcgcatacggacatggcattccaagtgtcaccgtgataaccggaacggatggttacgaaattgttcttgtcgggctttccggctgcataccaatattgcacggccatcttcaaggcaacttctaccgccaccgaaccggaatccgcataaaatatcttttgcatggacgggggtaccaagggcaacagcagtttgcctaactcgatggccggatcatgagtcagtcctccgaacatgacatgggacatcttgtctaactggtcttttgccgcctgattcaataccggatgattgtatccgtgcacagcacaccaccaggacgacattccctcgatgagtgtccgcccgtcttcgagtgtgatcgttgctccgtccgcccgctttactttgtagacaggcaatggatcggtagtagaagtataaggatgccacaaatgctcgcggtcaaactgggagtcggcgaagtggtaaccttcttccagaatcatcttcttgtcgtcggaaaccttggaaccgagtgtggtcagcaaatcacccacgatggcggaattgatgccgacaaacaaggctttgcgcatggcttcgggagtgagctgcgaacgtcctcctgcgaaacgcaggaaagcggtaggattgatgaagcggaacagggcgatggttcgcaggatttcttcttcgctcaatgccttttcattttccagtggagttccggggatcggacttagcaggttgatggggatggactgtacattcaattccgccaaagtgaaagcaaattcaatacgttgttccattgtttctcccatgccaatgatgccaccgcagcagatatccattcctacccggcgggcggcgtcgagagtggccagcttctgctcttgtgtatgtgtggagcagagtgtggggaaataggaaggagctgtttcgaggttgcagtgatagcgggtgattccggctgtgtgcaaggcgcggagttcttcttcgttgagtaatccaagggatgcacaaagttggatggacgaatgtttccgcataaggcgggccgcatcgcaaagttgactgatctgtttgggagaaggttttcgtccgctggtgacaagggagaaacggttgacgtcttgactttcgttgtattttgcctgtcggagacattcttcagcgggcaggagatcgtaaatctcggcttgagtcttgtagtgagaggattgtgcgcaccatttgcagttctccggacaccggccggacttggcgttgatgatggaacacatatcgaactcgtgcgaagcacaggtgatggtaatctcatgcgcggcggcataaagcgcctcgctgtcggccatgttggccagccaagtggcttgggcggacgatatgtcgaagcctgccagtacttggtctttgatttcttgaagtgtcataaatgtatgataagggatagtaacttttgcattctgcttgcgaagagccacatctaccacattggtatgcagatgaccgatctgaaattcacgtcccatactcgcaaatgcggcatagttcttcctgccccagtagcggaagcgggaaagaagggaacgtgtggtctgtatgtggcgttgtttcttcatcaggttcttgttttttgaagttaagaacggggcaaatgtacaaagattctttggataagcaagcgatacaataatatactgcaaatatacacccttaccttgtatcgtttatacacatcctttatcttgtattttttcttctatactccttgcgtaaattgaaattgaatccgacgtatatctgaagcgttccgaacccgttgtccagtgaaaaattattccggtggtaattgtagttctttccgacaaatgaagtgccgacgaaatattttccgttattatagacaactcccgcacggatcaaaaaatccaggttaaaattgccgtaccatgtcttcccttcgtgggtttctgcatctacatcggaggctttgtaggctatggcgggagtgagagacaggcatgccagacagttgcgggcaaatacccagttataggcataaccgaaactgatattggcattggtgtattttatattgttgactttcatggcaggattcatcgcttccagtatgaaagccggaagttctgcatagtcgaactcaagattatgttttgaaatggaaaagcctgcgataaacgaacctgcattcctgcgctgattggttgactggctgaaagcggcagggtaggagaatttgcggttgttgaagatatagtataggttcaatcccttgatatctacttttattccattgaacttttcggagtaattggcggggacatcttccgggaaaccgttgatcttatgaatcttatagttgttacctgtgcgacggtagaagatgtccactcccagcttggaactgtatagacttaaatcgaactctgttcccttgttccttcggttggtcttccggtaaatgtcgtccacgtctacagaccatcccaggaagatccatcgccagccgaagtacaatcctatcttgttatgcggattgggagagaaactcagcttctgcggttggggcagattgctggtaacggaataatattcaaagttgctgaaatgggtagtcatcaatgcgtaattataccggttgggactgatgtaaagggtgtcgaagtcactgaaattcatgaacttcctgatcgctctcttaaaagcgcttggtttggccggtatcacagaatcagtttgcagactatcgctcataagggtatctctcctttcagcctgggcctgtaaggagagtgacagaaacagaaaaagagatagaacaatttgcttcatcctgtgatttttcgttgttatgattgatgctgttcgtttcacgaatgtactacctttcgttgatttatactaataatcgtctaaaaaaatgtttcgtttcctaaacaaatgagatatgtattctgttagttagaacaagcaaataaatcctaagccacaaaattatgagaatctatttacgtttattagtggcgtttctattgctttctgccggcaatgtagtgtatgcagaagcacaacaagagaaacgcgtaacgggtactgtgacttctgaaggagagcctttacccggtgtttccgtacaagtgaaaggggcctcttccggcaccattaccgatatcgatggaaactattcaattgaagcccctgccaatgggactatcgtgttccgctttgtaggattgcggacagtggaacaagcggtgaacaaccggaatgtgatcaatgtcacaatggaatcggagagcaaagaactggaagaagtgatggttgtagcttatgctactgccaagaaatatagttttaccggagctgcctcgactatgaaggcgggagagatcgagaagttacagacttccagcgtatctcgtgtacttgaaggtacggtatccggtgtgcaagccagtgcttccagcggtcagcccggtacggatgccgaaatccgtattcgtggtatcggttcgatcaatgcctccagtgccccgttgtatgtggttgatggcgtaccttttgatggcagcgtcaactcgatcaatcctgatgacatcgcttccatgactgtactgaaagatgctgcatctgctgctctgtacggttcgcgtggtgcaaacggtgtgattatcattactacgaaacaaggacagcaggactcgaaagctactgtcaaggtgaaagctacactgggtggttccagtcgtgcggtacgcgattatgaccgtgtcaataccaatcagtatttcgaactttactgggaagcgcttcgcaaccagtatgccaagagctctgattatacccctgccaccgcagctacgcaggcttctaaagacttggttacaaaattgatgggaggcggtccgaatccttacggcacacaatatccgcaacctgtggggacagacggaaagctggcagcaggtgctcgtccgttatggaactccgactggagtgacgcgatggagcagcaagcgcttcgtaccgaactgaatctgagtgtttccggtggtggaaaggctaatcaatacttcttttctgccggctacctgaacgataaaggtattgcactcgaatccggctaccaacgtttcaaccttcgttcgaacgtgaccagtgaaatgacttcctggctgaaaggaagcatcaacctgagttttgcccattccatgcagaattatccggtttcttcggattcccaaacaagcaacgtgattacggcaggacgtactatgcccggattttatcctatttgtgaaatgaatacggacggcagctacaagctggatgacaatggggatcgtatctacgatttcggttcataccgtccttccggttctatggctaactggaacttgccggctaccttgcctttggataaatcggaacggatgaaagatgaattttccggtcgtacttatctcgaagctacgatcatcgaagggctgaaattcaagacaagtttcaacttcgacctgatcaactataatacgctggattatacgaatccgaaaatcggtccggctctggaaaacggaggtggttccagccgcttgaactcacgtactttttcatggacatggaacaacatcgcgtcgtatgataaaaccatcggtgatcatcactttaatgtgcttgccggaatggaagcctattcgtaccgttatgatgaactgactgcttcacgtacgaagatggcacagcccgatatgcccgaactggtagtcggctcacagttgacaggcggttccggttatcgtatcgattatgctttggtgggatatctcacccaggcgctttatgactatcagaataaatactttttctccgcttcctttcgtcgtgacggttcttcccgttttgcaccggagactcgctgggggaacttctggtctttgggaacttcatggcgtatcgaccgtgaaagttttatggcttccactgccaactggctttctgctctgacattaaagatgagctacggtgcacagggaaatgataatctgggtacttattatgcaagcaagggactttataccatcgtttccaatctcggagagaatgccttggtttccgaccgtatggctactccgaacctgaaatgggagacgaacctgaactttaacgtcggcgttgatttctcactgtttaacaaccgtttttccggttcgttcgacttctttacgcgtcgttccaaagacttactttattcccgtccgatcgctccttccttaggatatggctctattgatgagaatgtaggcgcattgaagaatacaggtattgagatggtgctgaacggaacgattatcaatcagaatggatgggtatggaaactcggaatgaacctgacgcattataagaataaggtaacggaacttccgctgaaggatatgccgcaaagtggcgtgaataaattgcaggtaggacggtcagtctatgacttctatatgaaagaatgggcgggagtagaccctgacaacggtaatccgctgtggtatatggatgagaaagatgccaatgataatttgaccggaaaacgtgtcacaacaagcgattacgcttcggcaaattattattacgtcaataaatcttccctcccgaaagtttatggcggttttaatacatcactttcatggaaagggttcgatctgtccgccatctttgcttatagcatcggtggatatatctacaaccgtgatattactatgattctgcacaacggaagtttggaaggtcgtgactggtctacggagatattgaagagatggacaccggaaaaccgttatacagacgtgccggctttgagcactacttccaataactggaactcagcttccacccgtttcttgcagaacaattcatatatgagactgaaaaacctgacgctctcttacgatctgccgaaacagtggatcagcaaactggcattgagcagtgtccaggtgtttgtgcagggcgataacctgttcactattcaccggaatcagggacttgaccctgaacagggaatcacgggtatcacttattaccgttatccggctatgcgaactatttccggaggtatcaatctatctttctaaaattacacgatatatgaaaaagataaaaattcaatctatacttactgctgttgccggactgtttctggcgacaagttgtagcagtagctttctggatacggaacctacggatgcggtaagctctgatcaggtagcagtagccggaaatgcagaacgtctcttcaacggagcttggtataacctgtttgaatacggcacgacgtatgccaatattggttatcgggcacttcaatgtcaggatgatatgatggcaagcgatgttgtctcccgtccgaaatatgggttcaattcttcctatcagtttaatgatgtggcgattccttccgatggaagaacttcgtttgcctggtatctgatctataagacaattgataactgcaacactgccatttcgattaagggtgactccgaggaacttcggcaggcacagggacaggcattggctttgcgtgccttttgttatctgcatttggtacagcattatcagtttacatatttgaaagataaagatgctccttgtgtgcctatatatacggaaccgactacgagtagtactgagccgaaaggaaaatcgacagtggcgcaagtttaccagcagatctttgatgatttgaatctcgcacaggattatctgacaaactacgtccgcaagggagacgggcagaaattcaaaccgaatacggatgttgtcaacggtcttatggcacgtgcttacttattgacaggacaatggggagaggccgccaaagctgccgaagctgcacgcaaaggatattcattaatgactaccactgccgagtacgaaggttttaataatatttccaataaggaatggatttggggatctcctcaaacactttcgcaatcggatgcaagttataatttctactatctggatgcaacgtatgtcggagcttacagtagctttatggccgacccgcacttgatggatacttttgttaaaggtgacatccgtctgcctcttttccaatggatgcgtgaaggatatctgggttataagaaattccatatgcgttcggatgatactgcagatctggtactgatgcgttcggcagaaatgtatctgatagaagcggaagccaaggtcagagatggagtagcactggatcaggctgttgccccattgaatacattacgtactgcccgtggcgtaggtaattatgatgtgacagggaaaacaaaagagcaggtgattgacgaaattctgatggagcgccgacgcgaactttggggagaaggattcggtataacggatgtactccgtaatcagaaggcggtagaacgcatggctttatctgaggatatgcagaaaacggaagtggattgctggcaggaaggcggcagttttgcgaaaagaaatccgttaggacattggttccttaattttccggatggtaaagcgttctcagcgaacagttcttattatctgtatgctatccctgaaaaagagattaatgcaaaccctaacttataaatagctctcttaattttttgactttgaccttaacttgtagaccggtatacgtcgtgacgatgcataccggtcgtttttttatacctgtatcttctgtttctttaaattgggcaaaaagaacgtgactaatcccaataacggcatataagcgcaaacgttataaaccgactcaattccaaatttatcagccatattgccaagtacagccgaagcgatacctgctactccaaaggcaaaaccaaagaaaagaccggaaatcaaccctaacttggtagggagcagctcttgcgcataaagcaggatagccggaaaagcagacgaaagcatcagccctacacaaaaacttaaaatgatggtccatgctaaagtggcatgcggcatcagtaagctaaaaggtgcagctcctaagatagaagcccaaatcacatatttacgtcctacacggtcgccgataggaccgccgagcaatgttccgatagcagtagctaccagaaaaataaataagtataattgagattcctgtacagttacattgaatttatgaatcaagtagaatgtataataactggtaaggcttgccatataaatatactttgagaagattaatatcagtaggatgccgatagataaagcagtcttatccatcggtaaaggcaaatgtacagcctttttcactgtagccttttgctctttcattcggttgagataagatttgtaccatttgcagatcgggtacatgacaccgatagcagccaaagcaaaaagcgcaaaaacggccagatgctctctgccataaggagccaccagcaaagctaccaataaaggacctagtgaacctcctaaattgcctcctacctgaaataacgattgtgccagtccccgtttcccacccgaagcaagaaaagtaatacgcgatgcctccggatgcaagacggaagaaccgattccgatcagaaaaacagagatcagcatccaataaagattgttggagaatgccagattgatcattcctatcattgtaaagctcattccgataggtagtgaccaggcaacgggatgtttatcgaagatgattccggtgattggctggaataccgaagccgagagttgataaaccagtgtgataaggccgatctgtgcaaagttgagtcccaaatcgtctttgaataatggataggctgccgatataacggactgcaaaagatcattgagacaatgcgaaaggcttaatgcgatgaggatagaaaacgtaattcttcctacgggttgttcctgattctgtaccataatacctattcttttgaaatgttcctgaaaaaatgactgcaaaggtacgtaaacttcccgtttctcaatatatttgtcactattaaatctataagtaatgaagaaagtagtagtagcgatggattctttcaaagggtgtctttcctcatcagaggtggaaaaggcggtggaagaaggcataaagctggtttgtccggattgtgaagtcattcgttttccgatagccgacggaggtgagggaatattgactgtcttggtagaagcaacacgaggcacttatcagaagatcatagcgaatgatcctttgatgcgcccgatagaaaccacttatggagtttcgggtgataaacgcgttgcttttattgagatggccaccgtgaatggtctgccgctattatcagaaactgaacgaaatccgatgctgaccactacttatggaaccggtgaattgatattgcacgctattgaacagggatatcgggaatttgtcattggtatcggaggaagtgctacgaatgatgccggagtaggtatgttacaagcattaggagcccgatttctcaataaggatggagcagtcttgggagaaggaggcgaaatcctgcatcgaattgccgctattgatttttcttccgttcaccctgcacttgaagatactcgtttcacgatagcctgtgatgtacgaaatcccttttgtggtccggaaggcgctgcgcatgtttttgcccggcagaagggggcggatgatgcaatgatagagaaattagatgcgggtatgcagtctttttcccgattgatccattcaactaccggaagagaaatcactcacgttcccggagcaggagctgccggaggcttgggaggtgcttttcttgcttttctgaatgctgaactaaagcccggcattgatttactgctccaaacattgaaatttagtgagaaaataaaaggtgctgatctgatcataaccggtgaggggagaacagaccgtcaatctttaatgggaaaagtaccttccggaatattagaagaggcgaaacgacaagggataccggtcattgttgtggcaggcagcatagaggatacggaaattctgaatcaggcaggttttcaaggtctcttttctatcattccttcgcccatgtctttagaaacagccatgaagccggaagtcgctaagaaaaatatttgccggactgttgctcaaattatctctttagtgaatttatagtggcgtttggagtgtaaattgtcgttaattcatttttgacttactgaactattcgtggtacctgatgttgttaaataaaaaaggaggataaaatgggctttatttggtatattattattggtattatagccggctttcttgcaggtaagataatgcgtggcggaggttttggccttattataaatttgttacttggtattctcggaggagtgctgggcggttgggtatttgcccttttcggacttgcggcttcgggattgattggaagtttgataacttctaccgtaggagctattctggtattatggattgcttctttattctcgaaatctaaataaagattttatataatttatttttaatctaaaaacagaacttaattatggaatgtagacatgggaatttctggattggacttggaattggttcaatccttggtgcagtagcttatcgtctttcacgtacagcaaaagccagacagttggaaagtgatatttataacgctattcaccgtatcggtcgtgatgctgaaatagcagcagccgaagctgaaagaaaagcgatgaatcttggcttaaaagctgttgaaacaggagctaaagtcgcagataaagtagctgaagaggctgataaagcagttggaaaagcaaaagaaaaatgggagaaataatcatccttgaaagtggtaatcaggtttaaaataaccggttatcacttttcttttatactaatagctttcttcttgaaaatttaccttaaccaaatactgtcactatccctcatatctgtttatgcataaacaaatcagtgtgtgcccgtacacattttaccttttatatccctctttttgtttcttttcacagataaaaagcttttctgtcatggtgtttattacctcccaaacatatatttgatggctttttccattatttttcttatgtttaacaacatacgtattacttgtcttcctttattaaatgtctgaatatcatatttatagcatttttatagtagaacgtgtgtgcgcacacacttttgcttaattcaataattcattttacatttgtcgtcgaaaaacaagatacttatcagtaaatggacaaagaattctcaaatattcgtattgtagacatcgccaagatggcgggagtctctgtcggtacggtagatcgggtgattcacaatcgtggacgggtatctgaagagaacaggaagaaagttcagactattctggagatggttcattatcagccgaatctgatggcgcgttcgttggcatctaaaaaacaatatcattttgtggcaattactccttcttttacgcacggagaatattgggaagctatttccgatggtatcgataaggcggcttcagagatggaatcttataatataacgatcactaaactctttttcgatcaatacaataataagacatttgatgatattgtccgcaacctgttggatgaaaaagtagatggggtattgattgcaacactgtttaccgactctgttatacggctttcgcaagagcttgacaggaatgaaattccctatgtttatgttgactccaatattgaagggcaacatcagttggcatatttcggaacggagtcttatgatgccggagtgattgctgcgcgattattgacagacaagatttcttcgacttcggatattctgatggcacgaattattcatagtggaaaaaacgactcaaatcaaggaaaaaaccggagagaaggcttttgtcattatctgaaagaaacaggatttaccggaaatttgcatgaagtagaattgaaaatcaatgattcggtttacaattttatcaaactggatgaaatctttgaagcgaatgcaactatagaaggaggaatcatctttaattcaacttgctatatcttaggaaactacctgaaagcaagaggaatgcaaaaagtaaaattggttggctacgatcttattgaaaggaatactcaactgctctccgatggcgttatcactgcattagtagcacagcgtcccgaacgacaaggatatgatggcatcaaatcattatgcaatcatttgctgttcaagcagaaccccgaaaaggtgaacctgatgccgattgatattcttctaaaagaaaatctgaaatattatctgaacaataagttataaaccatataaataaaaaagaaccatgaatgaattatttaacgtaaaggacaaagttgttgttatcaccggtggagccggaatcttaggtaagggtatcgctgcatacttagctaaagaaggagctaaagttgttgtactcgatagaagtgaagaagcaggtaagtcattggtagagagtatcaaagctgaaggaaatgaagctatgttcctgtatacggacgtaatggacaaagaagtgctggaaggtaacaaagtggagatcatgaaagcctatggccgtattgacgtattgctgaacgctgccggaggtaacatggcaggcgcaacaattgctccggacaaaactttctttgacttgcagattgatgcctttaagaaagtagtagatctgaatctgtttggtacagtattgcctacaatggtatttgctgaaatcatggtagaacagaagaaaggttctatcgtaaacttctgttccgaatcggctcttcgtccgttgacacgtgtggtaggttacggagctgcaaaagctgctattgctaacttcactaaatatatggctggcgaactggctttgaaattcggtaacggtcttcgtgtaaatgctatcgccccgggattcttcctgactgaccagaaccgtgcgctgttgacaaatcctgatggttctctgactgaccgttccaagacaattcttgctcatactccgttcaatcgtttcggtgaaccggaagatctttacggaactattcattatctgatcagtgatgcttctaacttcgtaacaggtacagtagctgttatcgacggaggtttcgacgcattctccatttaatacctattacttattacctattacttattacttaatacttatcataattatgtatctatgtgaacaaacttggcgctggtatggtccgaatgacccagtaagcttgtgggatatcaaacaggcaggcgctaccggtatagtaaacgcacttcatcacattccgaatggtgaagtgtggacagtagaagaaatcatgaagcgtaagcaaatgattgaagaagtgggtctgacctggtccgttgtagaaagtgtacctgtgcacgaacatatcaaaacgcagaccggtgaatatctgaaatatattgaaaactataaggaaagcatccgtaatctggctaaatgtggtgtaatggtagttacttataacttcatgcctgtattagactggacacgtacggaccttgcctatacaatgcctgacggttctaaagctcttcgctttgagaaagcggctttccttgctttcgacctctttattctgaaacgtccgaatgcggagaaagactatactccggaagaaatagccaaagcaaaagcccgtttcgaacaaatgagtgaagacgataagaaattgttggttcgtaatatgattgctggacttccgggatcggaagaaagtttcactgtagaacagttccaggaagcattggatcgttataatgatatcgatgctgagaaacttcgttctaacttgatcttcttcctgaaagaaattgcacctgtggctgatgaggtaggagtgaagctggtgatccatccggacgatcctccttatacaattttaggtttaccgcgtattctaagtacggaagaggactttaaaaaactgattgaagccgttcctaacgaatctaacggtctttgcttgtgtacaggttctttcggtgtacgtgctgacaatgaccttgcaggtatgatggagcgttttggcgatcgtgtcaactttgtacacttgcgtagtacgcagcgtgacgaagaaggaaacttctatgaagctaaccacctggaaggaaatgtagatatgtacaacgtaatgaagagcctgattcttctgcaacaacgtcgtaaatgttctatcgctatgcgtccggaccacggtcatcagatgattgatgatctgaagaagaagacaaatccgggatattcctgcttaggccgcctgcgtggattggcagaacttcgcggtttggaaatgggtattgcaaagtctattctataagcagaattcataattagcaatctattttaaagacactacggctattattgacagtaataatagtggtagtgtcttttatattgctcatttacggagctttcgtattaaaataagcttccggtgtgcaaatcaacttttggctttttaggctcggggatgatgagcaaggctatttgtgcacaagcctcagcatcggcgagagcatggtgatgattggttaaatcatatccgcatcgggctgccaccgtatgtagctgatgattgggcaactcttttccaaacactttccgtgaagtgcggcaagtacaataaaacttataattgggataagtcatttcgtatagctcgtgaacagctttcagacagccctcatcaaaaggactgttgtgagcaacaagcggaagaccgtctataagcggttttatttctgcccatacatcaggaaaatcttccgcttcttccgtatccgcgtaagtcagtccgtgaacagctgttgtccattgcgtataatagttgggacaaggacggatcagacgatagattttcttaacgatttttccgttcctcacgatgacaacccctacgctgcatacgctggtgcgctttccgttggctgtttcaaagtcgatagctgcaaagtccttcatgcgttttgctgttttttttgagacaaagttactacaaaaaagtgaaatgcggaaagttatagtgatagaattgagttacaagggttttagttgaagtggcgataattcgtgaagccattacaatccctgccgaagccaaatcctgacgccgcaacgttacttgttcgtaaccatgcccgaaaatgcgacaaacgggtacggatagcgaaacaatacgttaaggaatagtgagttaccgataactcacgcaaaaatttcggttacggaaaaagattgctccgttcctccccgttttgcgtaccgacaccggactcttcaccaactaattttgaaaccaaaaaattaaggacgatgaagagtacattttcagtaatctattacctcaagcgtcaggtagtgaaaaaggacgggacagtacccgtcatgggacgcatcacggtggacggcagccagacgcagttcagctgcaagctgacagtcgatccgaaactgtgggacaccaaaggtggacgtgtcacaggcagaagcgcggcggcactcgaaacgaaccgtatgcttgacaagatgcgggtgcgcatcaataggcactatcaggaaatcatggaacgtgacaacttcgtcacggctgagaaggtgaagaacgcttttctcggactggaacaccgctaccacacgctgatgcaggtgtaccgtcgtcacaatgaggactatgagaaacaggtggaagcaggcatgaaagcaaaaggtacactggaaaagtaccgtatcgtttacaagcacctgcaagagttcctcgacatccgctaccatgtgaaggacatcgcactgaaagagcttacccccgctttcatctccgacttcgagatgttcctgcgcacggacaaacactgctgcaccaataccgtgtggctgtacgtctgcccgctacggacgatggtgttcatcgccatcaacaacgagtggctgacacgcgacccgttccgcgagtatgaaatcaagaaggaggaaacaacacgcagttttctgaccaaagaggaaatacgcctgctgatggacgggaaactgaaaaacgccaaacaggaactgtaccgtgacctctacctgttctgcgctttcaccgggttgtcgttctcggatatgcgcaacctcacggaagagaatatccgcacctacttcgacgaacacgagtggataaacatcaaccgccagaaaacgggcgtggtgtccaacatccgcctgcttgacatcgccaaccgcataatcggcaaataccgtgggctgtgcgagaacggcaagatattccccgtcccgcattataacacgtgccttgccggtatccgtgccgtcgccaagcgttgcggcatcaccaagcatatcacgtggcatcagagccgccacacggcagccacgacggtatttctctctaatggcgtacctatcgaaaccgtcagctccatgctcggacacaagagcataaagacgacgcagatttacgcgaagataaccaaagaaaaactcaatcaggacatgaagaaccttgccgcaaggttgaacagtgttgaggaatttgcaggttgcaccatctaaaaaagagaagccatgaaacgtgacataatcatcatagaggacaaggcggtcagcgtaaccggtaacgacgtgtggatgaccgccaccgaaatcgccggactgttccatacgaccgtcccggcagtgaacgccgccatcaaagccatccgcaagtcggacgtgcttaacgactacgaggtgtgccgctacatgcaacttgaaaacggactgtacgcagatgtgtacgcgcttgaaatcatcatccccgtcgccttccggctgaacacctacaacacccacctgttccgcacatggctggtgggaaaagctctcgccaaagagaaacggcaggcatacgtgatgttcatacagaacggaaaagccgggtactgctgattgcgcataccacataagacaaggaaacgggcagcaccacaaaaagtgtcgcccgtttccttttttcttgccaaccgcgctcactccagcggcttgcggtaatttgcttccagcacttcacgcagccccgtttccgggtaaagcaccttccctcccaaaagtatgaagggcaacacgcggttgttgcggtattcctgcaatgtgcgtcggcttacgcggagcagttccgccacctcgccgtccgtcaggtaacgttccccgtccagcagaggacggtaactttccagaaaggcggacagccatttcgagcctttgcgcatatcctgcaccacagaggctatcggctcgtcttccatcgtaaaaacatcgttgttctcgttcatcataacttcggattcagtgggtgaataaatcaaatcatctgccgtgcggatagagcgtgccgataagcggtatcagccgcttcacctcctccggcttgtaataaaacctgcggtttatctgcgagtagccgataagccgcctgtcgcgcagcgtctgcaacgtgcgcgaacttattctcaactgcctacagacttcctcgcccgtgagccatctttccatgcgcctcgtgtcgcttttgcgcctcagggcggcgaccttctccgagagtgcgccgaatgccgccaccatcatctcgaaagtctttttctcgatagatactatttccatattcatgcaattatcggtttgcccgcaaaggtaacggtacggtcctgaacacgtgccgttttccgctgaaaggctgcctgttgcgccgtttgaccgggttacggagccatcttccgtaaaaatcttacgtgagtcacgtagtgagttgttaaagccccttttgtttattgccgatttttgctgcagaaacaaaaagaaaggactgaatatgaaagtgataacgatggaaagttccgccttccggtcattgacggaacagatagcggagattgcggcacacgtccgtgccgcctccggcgacaagaaagcggcatcgcccgacaggttgctcaccacacgcgaggcggcgcacctgcttaacgtgagtacccgcaccctccagcgtatgcgcagcgagcaacgcatcggttatgtcgtgcttcgcggtaaatgccgctaccggcagtcggaaatagaccgcctgcttgaagcgtgtgccgtcaacgaggacgcggcgacaccgcaggaattgaaacgcaaccacacgctgcgcactggcggcaaaccaaaaggaaggaggacataggtcatggaactgctcacacgaaacaacttcgagggctggatgcagaagctgatggaacggctcgaccgtcaggacgaactgctgctggcgatgaaggctgaggggaaacagcctactatcacggaaagcatccgccttttcgacaatcaggatttgtgcatgctgctccagataagcaagcgcacactgcaacgctaccgcagtgtcggcgcattgccctacaagacactgggcaagaaaacctattacagcgaggaggatgtgctgacattcctttccaaccatatcaaggacttcaaaaaagaagatatagccttctacaaggctcgtatccataatttctttcataaataacccattaaaacatttttcaaatggcaaagaaaaaagacgaaaaggacgtgctggtagtccgtgatgagaagacgggcgagatcagcgtggtagccgggctgaatgcagacggcacacccaagcgtacccctgcgaaagctgagaacgcgcagagtttcctgcaattcgaccgacacggcgacgtgctggacaacttcttcaagaacttcttccggcagtgcaaggaacccagccgcttcggtttctaccgcatcgcggcagaccaagtggattccatgcttggcgtgatgaaagacctgcttcagcatccgtaccagaacaaacaaatccttgcaccgcacaaaatcgacaccttcccttatcaacagcaggtgcaggaagagatggcggcacaaaagacagagaaacaagaacctcaaaaacaggaaaacatggaacaacagaaagaacagcaggaaagcccgcaacagacgcagggcagacagggctaccaacccatcaacgagagcaaaatcaactggcaggagctggaggacagatggggcgtgaagcgtgacgaccttgaaaagtccggagaccttacgaagatgctccactacggcaagtccgacttggtaaaggtcaagcccaccttcggcggcgaatcattcgagctggacgcccgcctctccttcaagaaggacggtgagggaaatgtcagcctcgtgccgcacttcatccgcaaggagcagaagttagatgagtacaaggaacacaaattctccgacgatgaccggaagaacctgcgcgaaacgggcaacctcggcagggtcgtggacattgaggacagggaaacgggcgaaatcatcccctcctacatcagcatcgaccgcaagacgaatgaaatcacggacattccggcaaacaaggtgcgcatcccggagcgcatcggcaagacggaaatcaccaaacaggagcaggacatgctccgcgccggactgcccgtgcgcgacaagctcatcgagcgcaacgacggcaggaagttcgtcaccacccttcaagtgaacgtggagcagcgcggcgtggagttcgtgccgggaaccggaaggtcgccccgtaccgcacagacgcaggaagccaaaggtgacacctcgaaaagtcaggcgcaaggcggggaaaatgccgcacagaccaagaaggagcaacgccgcaacacgtggatgaacgaggacggcagcatccgccccatcagcaaatggagcggcgtgaacttcaccgacaagcagaaagccgactacgtggcgggtaaagccgtgaaactggagaacgtgaccgacaagcagggcttccatgccacgatgtatatcaagttcaacccggagaagggccgcccgtaccgctacgaaacgaaccccgacaacgcccagcaggtcgccccgtccaacgagagccgcacacaggtggcggtgaacaacgagggcaaaaccaacgaggcgacaaagaacctgaaagagcctttgcagaaaggtcagaccgccccgaaggacgaccgccagcaacagcagcaggagaagccgaaaaagaagaacaacaaaggcatgaaaatgtaatcccgtgtccgccactgaatccaaaataaaatccaaagtatcaacaaaaaagcaagaaaacatgaagacaatcattgcagaaaagccctccgtggcacgtgaaatcgcccgcatcgtgggcgcgacaaagagagaggaaggatatttcgagggaggcggctatgccgtgacatgggcattcggacacctcgttcagcttgccatgcccgacggctacggcgtgcgcggatttgtccgtgacaacctcccgattattcccgacacattcacgctcgtcccccgtcaggtcaggacggagaaaggttacaagcccgacagcggcgtggtgtcgcagataaaagtcatcaaaagactgttcgacacaagcgaacatatcatcgtggcgaccgatgccggacgcgagggagagcttatcttccgctacctctaccactatacgggttgcaccactcctttcgtgcgcctgtggatcagctctctcaccgacaaagctatccgtgagggactgcggaaactcgaagacggcagcaaatacgacaacctctacctcgccgccaaagcgcggagcgaatccgactggctcgtgggcatcaacggcacacaggcgttatccatcgccgccggacacggcacgtattccgtggggcgggtgcagacaccaacgttggctatggtatgtgaacgctactgggagaaccgccgctttacgtccgaagcattctggctgctccatatcgcaacggacggttgcgacggcgaagtcgtgaaattctcatcctccgagaaatggaaagagaaagaaccggcgatggaactatataataaggtaaaggcggcaggttgcgccactgtcacgaaagccgagcgcaaggagaagacggaggaaactcccttgctctacgacctgaccacgctccagaaagaagccaacgccaagcacggcttcacggcggaacagacgcttgaaatcgcgcagaaactctacgaaaagaagttgataacctatccgagaacgggaagccgctacatccccgaagacgtgtttgccgaaattcccaaactgctcgctttcatcggcacacagcccgaatggaaagacaaggtgcgggcaaaagccgccccgacacgccgcagcgtggacgacggcaaggtgacagaccaccatgccctgctcgtcacgggtgagaaaccgctcttcctctccaaagaggacaataccatctatcagatgattgccgggcgcatggtcgaggcattctctgagaaatgcgtcaaggatgtgaccactgtcacggcggaatgtgccggagtggagtttaccgtaaaaggcagcgtcgtgaagcaaaccggatggcgtgccgtctatggcgaggaaaaagaggaaattaccatccccggctggcaggaaggcgacacgctgacaccgaaaggctcgtccattaccgaaggaaagaccaaacccaagccgctgcataccgaagccaccctgctctcggcaatggaaacggcgggcaaggaaattgaggacgacgcactgcggcaggcgatgaaggactgtggcatcggtactcccgccacacgcgcctccatcatcgaaacgcttttcaagcgcggttacatggaacgctgcaagaagtcgcttgttcccaccgaaaaaggacttgccctcaattccgtcgtcaagacgatgcgcatcgccgatgttgccatgacgggcgaatgggaaaaggagctggcgcgtatcgagcgcggggaactgtccgccgacaccttccgcaaggagatagaggcgtacacacgtgagataacctccgaactgctctcgtgcgacaagctcttcggcagccgtgactccggctgcgcgtgtcccaagtgtggcacgggcaggatgcggttctacggcaaggtggtacgctgcgacaacacggagtgcggactgcccgtgttccggctgaaagcgggacgcaccctgtccgacgatgaaatcaaagacctgctcaccgaagggcataccaagctgctcaaagggttcaagagcaaacagggcaagagtttcgatgctgttgtcgcctttgacggggaatataacacgacttttgtgttcccggaggctaaaaagggcaagaaattttcaggacggaagaaatagtattaactttgccacttgttcagagtaatgaattgttcttcgataccggattacactcatactttggatttagtggtggcactcggagggataccgagtgcctttttcttcctttttccaaccgattatcccgttaattatcaatccgctaaatccaaagtaatgaacaacaagaagaaaaacgagggtcagaccgacttttcctattacggtctgtacctgctggactatctccgcacgaacaagtttgaacaggctgacgacaccgctttcatacgggaacgggccgaccgtgccgccgaaacgtatgagagggcacggcttgaaggctatcccgccgatggtgcgcaggaactggcgatggacacgctgctgcgcgggctgcattattcccgttacgccatcctccgcgaagtcgtggaaaacgagtttgccgatgaagtgccggaagagaagcgtgaagcctttgtcctgaaactgctgccgcttgtcggcaacgtgttctccgtctatgacctctcggatgacaatttcgccctgtcttccgattacgacctgctctacacggagctgacgggagcaaccgtcctttacttagacgaatatggcgtttaaccgcaaacagaaactgcgggacaacatcgaggcgatacggacggcattcatccttgacagggaaaacaggacagcgacaaccgaagagcgtgccatacttcaaaggtactgcggtttcggcggtctgaaatgtatcctcaaccctgcaaaggaactgacggatgccgtccggtgggcgaaatccgacctcgaactgttcgccccgacggtggagctgcacaggcttatccgtgagaacagcaaggacgaaacagagtacaagcggtttgtggattcgctgaaagcgtccgtgctgaccgctttctacacccccaaagagataaccgacaccatcgcggacgtgctggcagattacagcgtccgccccgcccgtatgctcgaaccgtcggcaggtgtcggcgtgttcgtggattccatgctacggcacagccccaatgcggatgtgatggctttcgagaaggatctgctcacgggtacaatcttgaggcatctctatcccgaccagaaaatgcgcacctgcggttttgagaaaatcgaaagaccgttcaacaattatttcgacttggcggtgtccaacattccgttcggtgacattgccgtgttcgacgcggagtttcagcggagcgactctttcggcagacgctccgcccagaaaaccatccacaactatttctttctcaaaggactggatgccgtgcgtgacggcggtatcgtggcgttcatcacctcgcaaggggtattgaatagcaccaagacctccgtgcgtaacgagctgttcagtcaggccaatctggtatccgcgatacgcctgcccaacaacctgttcacggacaacgcggggacggaggtgggcagcgacctgattgtcctgcaaaagaacctcagcaagaaggaaatgtcgcaggacgagcggctgatgaccgtgatacagacggacacgaaaaccgacctgaccgacaacgcctatttcatccaccacccggaacgcatcgtgcatacgacgtcgaaacttgacactgacccctacgggaagcccgctatggtttatctgcacgagggcaagaccgcaggtatcgccggggacttgcgccggatgctcaacgaggatttccattacaggctcgccatgcgtctgtattcgggaacaatctggcagtcgggaacggaagaaaaggttaccgttcaaaaggaggcggagcgtcctgctataaaattggaaacggtatcttcggcgcagacggtggaaactccgacggaaaaaccgcaacccgttgaggaaaaaccggagatagagccacgtccgaaatattctgacggggtgcagctctccttgctcgacctctgggggatgacggaagaggtcagccaaccgaaaacctccaaaaagaaaaagacggtgaaaaaggcagttacggcaaagtccactccgcccaaaccgaaagtcacggttacaccgacagctccaactgcaaaacccgctatggagaataaggaggtgaaagcggagaacaccgccaagcctgccgacccggacgacatctatgcaaagctggactgggaaaccaatcctcccatcaacggcttctacgagatgatgatggaactcacgccggagcgcaggaaggaacttcgggagctggcaaggcagcataatgaaaaacatgaaaacagaacggttgcgacgatcacgccggaagtaccacgtgaacaaccccggcaggaggaaacacagccggaagcagtcgccgcacctgctgttaccgatgctccaccggaaacggtggctacttccctttttcccgacatcgaaccggaaaagccgaaggaggaagtcgcggaccttacgccgcgtgcctaccatcgcacgccggagatgcacctgcgcgaaggctcgctggtggctgaccgggggcgtcataacatcggctatctgaaggacatcacgccatacggggctacattccagccgctcgacctgaaaggataccagaaggaaaaggcgttgttgtatgtgtcgctgcgtgacgcctacgagcgtctgtaccgttatgaatcgctccggcgcgaggcaaatgttccgtggcgagagcatctgaatacctgttacgatgagtttgtcatgcgctacggcaacctcaacgccaagcagaacgtgaagttagtgatgatggacgcgggcgggcgtgacatcctttcgctggaacgggtggagaacggaaagttcgtcaaggcggacatcttcgagcatcccgtttccttctccgtggagagccatgccaacgtaggctctcccgaagaagccctgtccgcgtcgctcaacaaatatggcacggtcaatctcgactatatgcgggagataaccgacagcacggcggaggagttgctcacagccctgcaaggacgcatctattacaatccgctcgtgaccggttacgaaatcaaagaccgcttcatagccgggaacgtgatagagaaggcggaacgcatagaggcttggatgggcgaaaaccccgaaagtgagcgtatgccggaagtgaaacaggcgttggaggctctgaaagatgccgaaccgccgcgtatcgccttcgaggatctggacttcaatttcggggaacgctggattccgacgggtgtctatgccgcctacatgagccggctgttcgacacggaggtgaaaatcgcctattccgcaagcatggacgagttttcggttgcgtgcggctaccgcaccatgaaaatcacggacgagtttctggtaaaggggtattaccggaactatgacggtatgcacctcttgaaacacgccctgcacaacacctgccccgacatgatgaagtccatcggcaaggacgagcatggcaacgacatcaaggtgcgcgacagcgagggcatacagctcgccaacgccaagattgatgaaatccgcaacggtttctccgaatggctcgaagaacagtcgccgcagttcaaggaacggctgacgacaatgtataaccgcaagttcaactgtttcgtgcgcccgaagtatgacggctcgcaccagaccttccccgacctcaatctgaaaggcttggcaagccggggtatcaagagcgtctatccctcgcagatggattgcgtctggatgctgaaacagaacggcggcggaatttgcgaccacgaggtgggaaccggcaagacgctgataatgtgcatcgccgcgcatgagatgaagcgtctgaaattggcacataagccgatgattatcgggctgaaagccaacgttgcggagattgccgccacctatcaggcggcatatcccaacgcacgtattctgtacgcttcggagaaggacttttcgaccgccaaccgtgtgcgcttcttcaataatataaagaacaacgactacgattgtgtcatcatgtcgcacgaccagttcggcaagataccgcagtcgccggagttgcagcagcgcatcctgcaagcggagcttgacacggtggaggaaaacctcgaagtgctgcggcagcagggaaagaacgtgtcgcgggctatgctgaaaggtctggagaagcgcaaacacaaccttgaagcgaagctggagaaggtggaacatgccataaagtcacgcacggacgacgtggtggatttcaagcagatgggcatcgaccacatcttcatagatgagagccaccagttcaaaaatctgacgttcaacacgcgccatgaccgtgtggcgggactgggcaacagcgagggaagccagaaggcactgaacatgctctttgccatacgcaccatacaggagcgcacgggcagagacttgggagcgaccttcctttcgggtactaccatcagcaactcgctgacggagttgtatctgctgttcaagtatttgcgtccgaaggagctggaacggcaggacatccgatgtttcgacgcttgggcggcgatattcgccaagaagacgacggattttgaatttaacgtgacgaacaacgtggttcaaaaggagcgtttccgctacttcatcaaggtgccggaacttgccgccttctataatgaaatcacggactaccgcacggcagaggacgtgggcgtagatcgtcccaacaagaatgagatactgcaccacataccgcccacgccggagcaggaggacttcatacagaagctgatgcagttcgccaagactggcgatgccacacttctgggcaggctgccgctttcggaaacggaggaaaaggcgaagatgcttatcgccaccgactacgcccgcaagatggcactcgacatgcgcatgatagacccgcattatgaagaccaccccgataacaaggcgagccactgtgccaagatgatcgcggagtattaccaaaaatacgacgcgcagaaaggcacgcagttcgttttctcggacttggggacatatcagccgggcgacgggtggaacgtctattcggaaatcaagcgcaagctgacggaggattacggcataccgccaagcgaggtgcgcttcattcaggagtgcaagaccgacaaggctcggaaggcggtgatagacgccatgaatgccggaacggtgcgtgttctgttcggctccacctccatgctcggaacgggtgtgaacgcacagaaaaggtgtgtggcaattcatcatctcgatacgccgtgggtgcgacatgaagtcgcatagataattgttggaatgatacttacgggtatcagttttaacccgctgttccgtcagcggtagcctaccgaccggtgcaccctaatgttgtattaagcggtcgggacaaagtacactttcgcaagacaagacagaaccgtgaggggaagtcaagtacggttagtatcataccgtagagtggcgaggctggatagtatggttagcgcaagcgaactgttagtaaacttcgtaatgtcacgaaagagtgtaagatactggcacactctacccaaaagggaagcggtcggttaatcctctccatggtaggattacacggatataagcaccgccggaggatgagacagacctaacctatccgttagttatctatgtggaacatggtaagcctgtatatctcctgtcatgtaaaaaatggcaggtaagctgacagcaatgaaagccgaatggtgtgcaggtataagataacagaaaaagcgaatgccgttctgtaatggagcggatacggattgaaccgacatcacgagctgatgtgggcgacatcatccgacacgaaagtgggcagacttctgtgacgacattagggaggcaatcaaaaccgaatgttgtcaaatggtgattctttacaattaacttttagaactttcaaaaggaggaaagcaaatgaacgaaaacaagacatcgtgtgcgcctgctgacaatcagcaaacactttgggacagaatagactggaataaggcggagttggctgtcagaaagctacaagcgcgtattgtaaaggctcagaaggaaggcagaccgggcaaggtgaaagccttgcagtggacgctgacccactctttttacgcaaaagccttagccgtaaagagagttacttctaatggaggtggcaacacccccggggtggacatggaaacatgggagaaacccgaagcaaaaacacaagcgataagcgaactcaaacgcagaggctaccagccgaagccattgagaagagtccacatcaaaaagagtaatggcaaactgcgaccgttgggaataccgacaatgaaagacagagccatgcaagcactctacctcatggcattggaaccagtgtcggaaacaacagccgacacacgttcatacggtttccgcaaggaacgtcgctgtatggatgcggtaatgcaatgccataacattctccgaaaaggctattctcccgaatggattctggagggtgacataaaggggtgcttcgaccatatcagccatgaatggctgcttgccaacatccctatggataaggcaatgctccgaaaatggttgaaatgcggctatatcttcaacaaacagatgttcccgacagaggagggaacaccacaaggtggtattatctctcccacgcttgccaatatgacattggacggattgcagaaagtccttgcagagaaatataaacgagttagaatcaaaggcaagttatattcgccaatggtgaatcttgtccgctacgctgatgactttataattacctgcgagaaccgtgaaacacttgaaaaggaaatcaagccattggtagccgactttatgtctgaaagaggtctgaccttatcagaagaaaagacggtgataaccaatatccgtgacggtttcgattttctcggtttcaatatccgcaaatacggcaatgaaatattgaccaagccgaccaagaaagccgaaaaacgctttatggagaatatccgtaaggtgacaaaaggccataagggttgcaagcaggaatcattaatcaggatgttgaatgctaaaatccgaggatggggagcatattatcagcatggggcgacacgtgattcttttcatagaattgaccatcagatatttctcgccttgtggcaatgggctaaacgccgtcattccaagaaagggaaacggtggataaaagaccgttattggcacaatatccgagggaacagctggacttttgcggctaagttcaagaaatcaaacggcaaagaagaccaacttaccttgttgaaactggcatcttcgtttcctttcctgcaatatacgcagataaagggggacatgaatccgtttgatgcagattgccgcttgtacttcaataaaagaatgaagtcaaaaatgcttgtgacactgaaaggacgtaagtccctgctttacctatgggaaaagcaaggtcggaaatgtccgatatgtggtgaaccgattgacacgcataaggcatggaacgtaatgccaaccgtccaagacggacggaaatgtaatctgttggttcatgatgaatgtttcaaattatcccgtaaaaccaatggaaacaagaagtagtatgagccggtctctgcacacgaacagagacttagaaaagcttgagccgtatgaggggaaaccctcatgtacggttctgaggggggaagagggcagtaatgctctgacctacccgatcgaccgtccgacctgcaacagcgtgacggacgcggagttagagccggaaacgaaattgccaagcatttcgccgggaacaacgtggacgtaatcatctacgcggtggagaagtcactggacagctacaagttcaacctcctgcactgcaagcagactttcatcagccagctcaaaagcggtgctatgggggcgcgtaccatcgacgagggggcagtggacgagaaatcgggcatgaacttttcggaatatatggcgttgctatccggcaacaccgacctgctggacaaggcgaaacttgaaaagcgcatcgcctcgctcgaaggggaacgcaagtcgtttaacaagggcaagcgtgattcggagttcaagttagagtcgaagacgggcgagttgcgtaacaacacggctttcatagatgccatgacggaggactggaaccgcttcctttcggtggcgcagaccgacagggagggcaaccgccttaatataataaaggtggacggtgtggattccgccgatgagaaggttatcggaaagcgtttgcaggagatagcgaaaaacgccactacgggcgggctttacacacaggtcggagaactgtacggttttccgataaaggtggtgagcgagaggatactcaaagagggattggagtttaccgacaaccgcttcgtggtagaggggaactacaagtacacctataacaacggacatctggcaatggctgatccgatggctgccgcccgaaacttcctgaacgcgatggagaggataccctccattatcgaccagtacaaggcgaagaacgaggtgctggagagggagataccgcagttgcaggagatagcgggcaaggtgtggaagaaggaggacgagctgaagcagctgaaatccgaacttgccgcccttgaccgaaaaatacagctggaacttgcgccgcccacgcccgaagtcgccgaaaaggagaaagaagggcaacaggtcaagccggaagcggaagatgtgaggaacaggcaggcgcaatatcccgaaaatgcaccgccgcagatacgcagtccggcggatagtatcgttgccaaccatgtcataatcgggcgtccgggactgtatgccaaggaggaaacccggttcaaaggattgaaaatataaccttaggaattttatctgaagtattaataagggctatcccaaaaggtctaaaagtaaattttatcctttctgcaagtatctgtaggatggcaactgcatttttttctttttgggcagcccttattaaaatttattcttattttaggttatatacattcatgtccatttatgtaaaaaatcctgctgaccttgtttatgtcttgtcagtcaccatttgcaaaaccatatttgaccctcaaagaggctgaatttgataagcaacttgctacatactcataataaggagctaaatagaacacgaatgggaaatactcaaatgccaaactaaagaagatattggccaaaataaacgctataccgagagagaaacttgatttttcaacttcctaaaacagtgttgttcaaacatttctacttatttgtacttaccagttgaacctacgtttccctaataaaatgtctatggtaaaaagttaaaaaatcctcctacttttgttagatatatttttttgtgtaattttgtaatcgttatgcggcagtaataatatacatattaatacgagttaggaatcctgtagttctcatatgctacgaggaggtattaaaaggtgcgtttcgacaatgcatctattgtagtatattattgcttaatccaaatgaatattataaatttaggaattcttgctcacattgatgcaggaaaaacttccgtaaccgagaatctgctgtttgccagtggagcaacggaaaagtgcggctgtgtggataatggtgacaccataacggactctatggatatagagaaacgtagaggaattactgttcgggcttctacgacatctattatctggaatggtgtgaaatgcaatatcattgacactccgggacacatggattttattgcggaagtggagcggacattcaaaatgcttgatggagcagtcctcatcttatccgcaaaggaaggcatacaagcgcagacaaagttgctgttcaatactttacagaagctgcaaatcccgacaattatatttatcaataagattgaccgagccggtgtgaatttggagcgtttgtatctggatataaaagcaaatctgtctcaagatgtcctgtttatgcaaaatgttgtcgatggatcggtttatccggtttgctcccaaacatatataaaggaagaatacaaagaatttgtatgcaaccatgacgacaatatattagaacgatatttggcggatagcgaaatttcaccggctgattattggaatacgataatcgctcttgtggcaaaagccaaagtctatccggtgctacatggatcagcaatgttcaatatcggtatcaatgagttgttggacgccatcacttcttttatacttcctccggcatcggtctcaaacagactttcatcttatctttataagatagagcatgaccccaaaggacataaaagaagttttctaaaaataattgacggaagtctgagacttcgagacgttgtaagaatcaacgattcggaaaaattcatcaagattaaaaatctaaaaactatcaatcagggcagagagataaatgttgatgaagtgggcgccaatgatatcgcgattgtagaggatatggatgattttcgaatcggaaattatttaggtgctgaaccttgtttgattcaaggattatcgcatcagcatcccgctctcaaatcctccgtccggccagacaggcccgaagagagaagcaaggtgatatccgctctgaatacattgtggattgaagacccgtctttgtccttttccataaactcatatagtgatgaattggaaatctcgttatatggtttaacccaaaaggaaatcatacagacattgctggaagaacgattttccgtaaaggtccattttgatgagatcaagactatatacaaagaacgacctgtaaaaaaggtcaataagattattcagatcgaagtgccgcccaacccttattgggccacaatagggctgactcttgaacccttaccgttagggacagggttgcaaatcgaaagtgacatctcctatggttatctgaaccattcttttcaaaatgccgtttttgaagggattcgtatgtcttgccaatccgggttacatggatgggaagtgactgatctgaaagtaacttttactcaagccgagtattatagcccggtaagtacacctgctgatttcagacagctgaccccttatgtcttcaggctggccttgcaacagtcaggtgtggacattctcgaaccgatgctctattttgagttgcagataccccaagcggcaagttccaaagctattacagatttgcaaaaaatgatgtctgagattgaagacatcagttgcaataatgagtggtgtcatattaaagggaaagttccattaaatacaagtaaagactatgcatcagaagtaagttcatacactaagggcttaggcatttttatggttaagccatgcgggtatcaaataacaaaaggcggttattctgataatatccgcatgaacgaaaaagataaacttttattcatgttccaaaaatcaatgtcatcaaaataatggagcggtcaggaaatttctataaggcaatacagttgggatatatacttatctccattcttatcggatgtatggcatataatagcctctatgaatggcaggagatagaagcattagaacttggcaataaaaaaatagacgagctccgaaaagaaataaacaatatcaatattcaaatgataaaattttctctattgggtgaaacaatactggaatggaacgataaagatatcgagcattaccatgcacggcgtatggcaatggacagtatgctttgccgtttcaaggccacctatccagcagagcgcatcgatagtgtgcgcagtcttttagaggataaggaacgacagatgttccagatagtccggttaatggatgaacaacaatctattaacaagaagatagccaatcaaattccggttattgtgcagaaaagtgtgcaggaacagtccaaaaagccaaaacgaaaaggtttcttgagcatcttcggcaaaaaagagggaacgaagccaacgacaacaacgactacgctccgttcatccaatagaaacatggtcaacgaacagaatgcgcagagccgtcgattgtcagaacaagccgatagtcttgctgcccgtaatgcagaacttaacagacaactgcaaggattgatttgccaaatcgaaaagaaggtgcaatctgatttacaaaatagagaaagcgagataacagccatgcgtaaaaaatcatttatgcagataggcggcttgatgggatttgttcttttgctgttggtcatttcctatatcatcatacaccgtgatgcaaagaacattaaacgatacaaacgcaagacaacggatttgatcgagcaattggaacagtccgtgcaacaaaatgagatactcataacctcccgaaagaaagcggtatatactattacccatgagttgcgtacaccactgacggcaataaccggctataccgaacttttgcggaaagaatgcaatagcggtaataatgggcaatatatccaaaatatactgcaatcctccgaccgtatgcgggatatgctcaacactttgcttgacttcttccgcctggacaacggcaaggaacagccccgtctgtcaccctgccggatttctgcaatcacgcacacacttgaaacggagttcatgcctgttgccgtgaacaaagggttgtccttgtccgtgaagactggacacgatgccattgtattgaccgacaaagagcgaataatacaaatcgggaataacctgctgtcaaacgctgtcaagttcacagaagaaggcggtgtttctttgattactgaatatgataatggagttctgacactggtcattgaagatacaggtacaggcatgacagaagaggaacagaaacaagcgttcggtgcgtttgaacgtctatcaaatgccgctgcaaaggagggtttcgggcttgggcttgccataatgcgtaatattgtgtcgatgcttggcggaacaatccgtttggacagcaagaaagggaaaggcagtcgtttcacagttgaaatttctatgcaggaagctgaagaacagcttggatatacaagcaatacacctgtttatcataacaataaattccatgatgttgtcgccattgacaatgatgaggtattacttctaatgctgaaagagatgtattcccaagaaggaatacactgcgacacttgcaccgatgctgcggcactgatggaaatgatacgccagaaagaatacagcctgttgctgacagacttgaatatgcctggtataaacggtttcgaattgctggaactgttgcgttcgtccaacgtgggcaattcaccaacaatcccggtggttgtggcaaccgcttcgggcagttgtaacaaaggggaactattggcaaaaggctttgccggatgcctgttcaagccgttctccatatcggaactgatggaggtttccgacaggtgtgccataaaagcgacaccggacgggaaaccggacttttccgccttattgtcctatggcaatgaagccgtcatgctggaaaagttgataactgaaacagaaaaggaaatgcaggcggtacgggatgcagcaaaagaaaaagacctgcaaaagctggattccctgatccaccacctgcgcagttcgtgggaggtgctccgtgccgaccaaccgctgaatgtactttacggattgcttcgtggcgatgctctcccggatggtgaagcgttaagccatgccgtgactgctgtgctggataagggagtggaaataatacggttggcagaagaggaaaggagaaaatacgaagatggataagacaaaaataattgtggtggaagacaacatcgtgtattgcgaatatgtctgcaatatgctgtcacgggagggctaccgcaatatgaaggcttaccacctctcaaccgcgaagaaacatctgcaacaggcaacagataatgatatcgtggttgccgacctgcgtctgcctgacggcagtggcatagaccttttgtgctggatgcgaaaggagggaaagatgcagcccttcatcattatgaccgactacgccgaagttaataccgccgtggaaagcatgaaactcggctcgatagactatattcccaaacagcttgtggaggataaacttgtccccctgatccgttccatactgaaagaacgtcaggcaggacaacgccgtatgcctgtattcgcccgtgaaggttccgcttttcagaaaatcatgcaccggataaggctggtagccgccaccgacatgagcgtgatgatatttggtgagaacggcacgggtaaggagcatattgcccatctgttgcatgacaagagcaaacgtgcaggcaagccatttgtggcggtggactgcggttcactctccaaagagcttgcaccgtcggctttcttcggacacgtcaagggagcgtttacaggtgcggacaatgccaagaaaggatatttccatgaggcggaaggcggcacgctttttctggacgaggtaggaaacctcgcgttggaaacccaacagatgttgctccgcgccatacaggagaggcggtatcgcccggtcggagacaaggcagaccggaatttcaatgtccgcatcatcgctgctaccaatgaagatttggaagtagcggtgaatgaaaagcgttttcggcaggatcttctgtaccgcctgcacgacttcgggataaccgttcctccgttgcgtgactgtcaggaagacatcatgccgctggcagagttcttccgtgatatggcaaacagagagctggagtgtagcgtgagcgggttcagttccgaagcacgtaaagcgttgctgacacacgcatggccgggcaacgtgcgggaacttcggcagaaagttatgggtgctgtattgcaggcgcaggaaggtgttgtcatgaaagagcatctggaacttgccgtgacgaaaccgacctctactgtcagcttcgccttgcgcaatgacgcggaggataaggagcggatattgcgtgcgttgaaacaggcaaacggcaaccggagtgtcgccgcagaactgctcggcataggcaggacaacactatacagcaaacttgaagagtatggacttaaatataaattcaagcaatcatagcccgtaattcactgaatttggctatctttgcataacatttgagaaaaacggcgattggcaggagcttttcgccgccaacatataggataagaccgcaaggcgtttcaagcgaaaatctggtaaattggaactacggagacgattgcgtgatgcttatgctatgcttacgcatagcgtgcattcacgtactctccgtaaaggctttaccagagccatcgcttgaaggtagtgtgaattgcacgctacttttttacccttgcctaacgaaaggaaacgattatgggtaaagttcagattctcgccgtactgacgatggacggatgtctttcttcagagttatatgataaagcacatcaggatttgtgccttgaccgttgcggtcttgatgaaatcaggaagaaagccctttaccgtgtgacaccggactattccatttcaatgctgcacgaatggagaaaagacggcacaaacatccgttacctcgcggaagccacactggatacggcagattatataaacggactactgcgtatgcacgctgtggatgaaatcatactatacaccgttcctttcatatccggaagcggacgacatttttttaagtcggctctgccagagcaacactggacgctttcctccttgaaaagctattccaacggtgtatgtcgcattatctatatccttgataaaaaagcaagatagccaaaatgtgcggcaagcatacatttctattttcaggaatagaataaatgttctgattacaaacaatttaagtcggagataatttgtccttgtgaaaaaatattgaattttatacctctgaaatccagtactttgtaaaattgagtgttggattttttattttctgccgcgttttttgccaattatattcatgtgcgcacgcagaaaacaaagtgtaattttcaaaattgacagaaccatgaattatttcttgctggcggaaaccgactttttccgcctgataaacgaagccggtgactgcaatatggaaacggcatacacggcttttgccacccaagtgatcgaactgtgtaacggtagcatggacgcgaaccttaccgtcatcgcgcttgcctacatcgaaatcgagttgcagcaccatcccgtgcgcaacctgtcagaagaaaagagagagattgccgcctatgtcagcaaggccctgtctttcgtgaggaagatgcagaaattccttgccacgccccaagtgccgccactgatatccgccaacaacacaacagaaaccgccaccagcctcctgcaatggacgggcaatgccatcgacctcgtggaacttatctacggcatcgacgagatgggctgcatcaacaacggcaacatgccgctcaaacagcttgccccgctcctttacaagatattcggggttgagtcgaaggactgctaccgtttctacaccgatatcaaacgccggaagaacgaaagccgcacctacttccttgacagaatgcaggagaaattgaacgagaggatgctgcgcgatgatgagttggatcgtatgaggagataaaaaacaaattcattagaataaatcacatcaattcaattcattattttgttatattagaaaaagatattaactttgcattgaaattgatatagtcataattcagatgaactcaatacacgatataacagactacattatcttacgagtaaaatcggaagatagatttgcgtctttaataaatttaaagttgcagaagttattgtattatgttcaagcatggtcttatggtatcaataaaaaacctatgtttgacggcgagtttgaagcatggattcatggtccggtaaatcgagaaatctacaatcgatttaattctacaaaatatctctattcagaaatcaatattgatgattgcatgaatcacaatgtgagtttatcatcagaagacgctgaattcattgactttatattggagaattatcttaaatatagcggtgctgaattagaacgattgtcccacaatgagatgccttggattgaaacacgtggagatttaaatgtaaatgagcgttgtgacaaggttattactccagaactaatgattgagtattatgggaaaaaatgggaaactattaaatcttaattcagattctcctaaatacggaaacaaatcattagttaccaaagaacaagaaaatgagttaaagagaaggaagataactttttccttctcttactttaagcagatacctaattttcagattggagagtgttctaagggatggcatattgggcttcttgaaagattaggtgctttgggtactatgacaccgcaagaagtattagaagaaaatagaggtagtattgcattaagatgtcatccaatagattggagtgctaaaaacattcctattcaacgaaaagatttagattggctaccaaaagaaatattggacaatgagacagattttccaataatgcaattttcgataacaaaaagtacggggcgtattgtaggttattttgatcgggattcttctatatttcacatagtattattagatcctgaacataatatacaaccggcaaagaaaactaattatcaaatacaaccaactacaaaagggttatctcaatatgatgatttattaaataagttggaacgaattaaaagtatcgtatcagattgttctgataaaaagtgcaaattgcattcacatattagtgttatagaagaattacatgacaatattgtttatataggacttgataatgacttctatagcacttatcaagaaatcttaaagaaaattccattgcaaaaaattttggaaaacggaatcttagtaagtatggataatgcttaagttctaaaaaaatgaagaaaggtttatggtaagcctttcttcatttttttatttacttctgctgcaacagatatttcaggttatcatcgcccgcgatgcgctccagttcctcctgcacaatctgcttcacctcttccttgatacgccggtagttcgcctgcaccgtttctttcatgcggtcgttgccgtcctcgtccgtgaaatcggtaatgaccggaattttcttgtaggcacgttcctcccgcttcaccttctcggcatccaccacaatctcgcagtgaaaaattttctgttcgatacgttcgttgaagttgtcggacaccgaaccgacaaacattccctgcgtcagaccggaaatcttgctcggcggaatgagcgcatccatctgcgtgttgatggaggtggaaacatcctgccggttgatggagatagactgccgtttctgcaacaccttaccgaaccgttccgatagtgtctttgccgtttcacctaccacctgcccggagaaaatgttaccgaccgtattcatcaccactttcgcctccttatcaccgtagtcgcgcaccagctggctgaaatcctgaaatcccagacacacggcaaccttgttgcttcgggcggtggctataaggttgtccaaccccttgaagtatatcgtgggcagctcgtcgatgatgaccgatgacttcagcattcccttcttgttgatgagtttcacgatacgggagttatacaatccgagagccgccccgtagatgttctgacggtcgggattgttgccaacgcataggattttcggctcttcgggattgttgatgtccagcgtaaactcgctgtccgacatcacccaatagagctgcggggaaatcatcctcgaaagcgggattttcgccgacgctatctgccccatgagctgctccgcagcccctccgagccaagcatccatgaacggggaaaggtagttttccagctccgggtaagaggtcagtatcgggaaaatatcctcgtagcggcggttcaaaaactcgatggcatggggaaacgtgcaatacttcccgttctgatagattttgagataccagataatgctggcaaacaaaatgataggtgactccacgaagaagtcgccctgcttttgcacccaagttttattgaggttaagcattatcgtgtaggcactctcgtaagcgtccgtaatatcctccatgaaatccgggtgtatgggattgcaacggtgtgagcgtcgcgggtcgtcgaaattgatcacatagaatttcggcttcaccttgtagccctccgggtggttcagcaaatggttgtaggctatggtggacaagtcactgaatttgaagtcatatacatacatcgagaagcccttttcaatctgttgcttgataaaattgtttaccacggcgtatgacttgccgctgcccggcgtacccaacacgatggacgcacggaagggattcaccacattgatccagccattgttccaacgctttttgtaatagaagcgtgtgggcagattgaccgaatactcgctttcgatgagcctcgtttcctgcatgaaactctcattctcgttgttgaaaacatcctccatcagattgtgtttcaacaggcggctcatccacagcccgcccatcaaaagacagacatagcccgtgccgatggtaaggatatacaagcccgtcaccgcttcaaccggcagcggcagagccagtatccaccagttgaggaaaaacagcacgaatccggcggcgagtgccgtccatattcttccccaagtgattttctcgcccttgacccctttcgtacccagacaggacagggcaagcagcaggacggcaaacagtttcgtgtacagaatggaatggaacagccccgccgtgcggtcgaagttcagaaggattttgtccaccacaccgatgttcacgccccatagccggatggcttcgtagcagaaccagtacacgttcatgaccactaaaatgatactcacggcacgcagaaaatccatgattttcgccaatgccctcaaatcgtcttcttgttgtgacatacattgattttttaattgttgatactccgattacaaacccaagcccttgcgctttttcttctttttgcgcttcatcgcccggatgaaagcctcttcctcggcatctaccgccggaccttcgggagtgagcaagcccattccgcccgatacgtcttcacggtcgtatgcggtctgtccgtgtgccttgtccgcagcatccatagggatggataacggtatcggcggttgtccggcgtatggcagggtgaagtgttcctgcaaggcattcgccgaaagctccttgcccatgcgcgaaccgttcagcacactccccgtgcggtggtcgatgaaggtagccccgtagatgcgcccttcctccgtgtagcgcagtacggtgtcgatgcccttctctttaagttgggaaacaaacctatccttgtcataagtgccttgcagcacggaaagaacggtacgtttcgtcatgtctgccagtttcctgtccttaatctccgatctggaacgtacaaacttcttctgcatggcttcatagcctgcggacttcccgaagagcgaggacttgaacgggttgcccaccttgttgcccctgccgtccgtgacggaatagaccagcccgtgatattcccgtccgcgcacgttacccctcgcttcctccaccgtcaggttatagatggaaaggagcgcacggtattcgcccatcgtctggaaacggtactgcccgttcagagctttcacggtgttgcctacctgtttcttcacatcgcctgccgatgcgtccaccttgcttagcggcgtgtcaagacggcggttcctgcgctccgcatcgtgcagcccgtatttcttctccagctcacgggtgatttgtttgctacgatagtagttgttcttgtcgctgatacatttcccgttctcgtccacccgaaccgtcacgatgtgcaggtggtggcggtcgatgtcctcgtgcttgaaaacaagataaggctggttgccgaaaccgagtttttccagatactcgcgggctatatcctgcaattccgcatcggtcaacgcatcctccggatgcgggttgagcgaaatatgcaccaccggcttctccaccttcatctgtggcggcatgaaggtgagaaaaccctccatcgccttgttgatgtccacctttcccgaaccgtcattgtagatgcggttggtcgtaagcaaccgcccctgcgcctcgttaatcttctccccgttataggcaatcgcgccgtacaacgagtttcctacactgatttttgcgaccatttcgcctccatttcccttgaaagttccacaatccggcggctcagtttcacgagttcgacggtgtgttgctctaatttgtagagcaacgccatcgcctttttctctgaaaaatgcagcctcagttccttcacgacttggttgtaattcgtacccacggcacggaactgtgcatgaaaatccgacagtttggtgtaatagtccaccagcgtcttgtccaccttaagcaccttgaacggctgtccgaagaagtgcgccttgaggaaaaccgaccgtgcatagacacccgattttccgaacatggcgaggaaacggttgtgttcctcctcattgaaacggacggtgtaacggtacaccgccggatcaagtttgggatttctccctgatttgcttttccttttctctttcatattactttggatttagcggattgacggcataagccgccgcttcggattacagcaccgcagttttgaaaggcttcccgacttcggagggaaagcccgccccctgcaagggcaaggcgttttccgggatgctcaaaatattttgagcggctgaaaacataccttgctatgttcaggtgaacataaaaatccgtcaggggacggatgggaagatacctttcaggactccggctgtgccaccatcggcgaaccctgctgtccgggggcaaagttacgtccttaaagcggtatcggacagacgcttgacccggtcaatgactgccaaccggcgcaacgtgctgccaattgcttaggaagtgatacaagttccaaaatatacttgtttatttgcagcatgattcaaggaaccaacgatttgaagatatgagaaacggaacattcaaatacccggaaaaccgcttcttcggacacttgccgaagcggatacccgaaccgtcggaaccccggttatccgacaatccggtgaagtacggattcaatgacttcatgacgcagtgtcgtcattcatcacttgttcgccgcaccgcttcaccacagaaccggatacgcgatgacccgcccgtgtgtctgttcactgaagcggataatgtagcaaccaaatccgcatataaatagaaaaagaaatcttcaacaattaaaataaatggaactatgagtaaggaaatcttcgttgcattcgcaacacagaaaggtggcatcggcaaatccactgtcacggcacttgccgccagctacctgcacaacgtgaaaggctacaatgtcgccgtcgtggactgcgacgacccgcagcacagcatccacgggctgcgcgaacacgaaatggggcttatcgacagcagcacctacttcaaggctctcgcttgcgaccatttccgccggatcaaaaagaacgcctacaccatcgtcaagagcaatgcggtgaacgccctcgacgatgccgagaggatgattgccactgaggacatgaaacccgacgtggtgttcttcgacatgcccggcacgctccgtagtaacggcgtgataaagacgctctcgcagatggactacatcttcactccgctgagtgccgaccgctttgtcgtggagagtaccctgaaattcgtcacgatgttccgcgacaggctgatgactaccggacaggcgaaaacaaaggggctgcatctgttctggacgatggtggacggcagggagaggaacgacttgtacggcatctacgaggaagtgatagccgaaatgggctttccggtactttccacccgcttgcccgacagcaagaagttccgccgtgacctttcggaagagcgcaagagcgttttccgctccaccatcttcccgatggacacggcactgctgaaagggagtggcatccgggagttttccgaagagataagcgacatcatcagaccgcagtgagcatgggcagcaggaaagtgaacacggaaggcatcgacgaggaactgctgttagcctccatcgggcggcgcacacaggacgggacactgcgccccgcacaggaagtacccgcagctgcaccgaccgaagaggacaccgccgcaccggaaccatctcctgtgcaacccgtaacacgggaaaaagcgcagagggaaagtggacgccggaaaaggcaggacgaggactacaacgagctgttcctgcgccgcaacgagataaagacccgccaatgtgtctatatcagccgtgacgtccacggcaagatcctcagaatcgtgaacgacatcgccggaggggaaatctcagtaggcggatatgtggataccgtgctgcgccagcatctggaacagcacaaggagagaatcaacgaactgtacaagaaacaacgtgaagatctgatttgaaaatggaaaaagaaatgacaccgaatgaaaaaagaccacagcaagactgcggaggtatgtttgcccaagtgcaggcgagtgtggaaatactgtcgcctgtcccggtaaccgacaaatgctgcgagaaggactatgaacgtctgttcatccgcgacccggaagtaaaggcacgtgaggggaaaatggcgtatgtgcgcccggagtaccacgagcgtatcatgcgcatcacccgtgtaatcgggcatgaccggcttacgctgtccgcctatatcgaccatgtgctgacgtaccatttcaaccagtgcgaggatgcgataaagagcctttatgcccgaaattacaattcagtattctaaccaaaacggaaggatatgaattacacaattagcatgacagacattctgctggcggtatcggtcggctgcaacctctggttcctgttcctgctcctttacgagcgcatcatggacacgcggattgtccgcttcttcaagggcattgccggattatggcggtcactggacgggaatgaggctaaacgcatagcggcacacgaggaagtccctgcggaaaaggcggacatcatcggcgagagccgtttcaggatggcatccacccggacaaccgctgccataccgacgcaagaagccgccacttcggaaaaaggcattgagctgtcggaggaagaggctacttttgacgacggaaaaacgggaaacgcatcccgcccggcacaagtcccggaggaaaaactcgatgagaccttcacgagcataccgccggaggaactgggatacggggacgacgaaccggaagaggacgcctcggacacgccacgggcttcgggcagcagctttgacgagattgacgacgcctgcaagaccgccaaaaacccggacgcgacacaggcggaacgtgaaaaggcggcgaaggtgttcaccgacatggagggcacggagttgtacgagaaaatgatggaaggctcttcggagataggcatccgcatcaaggggcttatcgagattcggctgaagaaatctgaaaaggagttcgtcgtgccggacaacatcgaggagttcgacattcgcaactatgtatgacaacaataaaagaaatgaacatgaaagaatgacatcaacccacgcggcgaggaaacgcaaggcgcatccccatccgcaacggacacgcccacgtccgtggaaacaaacgggcatccactaaaaccaaagtaaagaaacaaagtatcaaccgcccgacaaaggaccatccacccttttgacggcaaaaaacaagaacagtttatgaacaagaacatcttgaaaaacagaaaagcaatcctctccgcggcacttgtcatcgccgcaaccgcctccgctttcgcgcagggaaacggcatcgcgggcatcaacgaagccacctctatggtgagttcttatttcgaccccggaactaaactgatatacgccatcggtgcagtcgtcgggcttatcgggggcgtaaaagtgtacggcaagttttcatcgggcgaccccgacaccagcaagacagccgcctcgtggttcggcgcgtgcatcttcctgattgttgccgccaccatcctgcgctcattcttcctttaataaataatgtatggctgaatacccaatcaacaagggtatcggccgtccggtagagttcaagggcttgaaggcacagtacctcttcatcttctgcggaggtctgctggctctcttcgtcctgttcgtcatcctctacatggtcggtatcgaccagtggatatgtatcggcttcggcgcggcatcgtcctccctccttgtatggcagaccttcgcgctgaacgcccggtacggcgaacacgggctgatgaaattaggagcggcacggagccatccccgataccttatcaaccggcggcggataacccgtctgttcaaacgacaacgaaaggaagaaagacaatgaggaatacatcgaaaatgacaacactggaaaacaggttcccacttttagcggtggagcatggctgcatcatctcaaaggacgccgacatcacggtggctttcgaggtggaactaccggaactttacaccgtgacgggtgcggagtacgaggcgatacacagttgctggtgcaaggctatcaaggtgctgccggactactccgtcgtacacaaacaggactggttcatcaaggaacgctacaaaccggagcttcagaaggacgacatgagctttttaagccgctctttcgagcgtcacttcaacgagcgtccgtacctgaaacacacctgctacctctacctgaccaagacaacaaaggagcgtaaccggatgcagagcaatttcagcacgctgtgccggggacatatcatcccgatggagctggacagggaaaccacgaccaagttcttggaaacctgcgaacagttcgagcgtatcatgaacgacagcgggcttgtcaggctgcgccgcttctccaccgacgagatcgtggggacggagggtaaggcgggacttattgaacgctacttctcgctcatgccagaaggtgacaccaccttgcaggacatcgagctttcggcaagggagatgcgcatcggcgacaaccgcctgtgtctgcacaccctctccgacgcggaagacctgccgggcaaggtggctaccgacacccgttacgagaagctctccaccgaccggagtgactgccgactgtcattcgcctccccggtggggcttctgctctcctgcaaccatatctacaaccagtatgtgctgatagacaacagtgaggaaaccttgcagaagttcgagaagtccgcccgtaacatgcagtcgctatctcgctattcaaggagcaacagcatcaaccgcgagtggatagaccaatacctgaacgaagcccattcctacggactgacctcggtacgggcacacttcaacgtcatggcgtggagcgacgatgcggaggaactgaagcatatcaagaacgacgtgggcagccagttggcaagcatggaatgcgtgccgcgccacaacaccatcgactgcccgacactctactgggcggcgatacccggcaatgcggcggacttcccggcggaagagagtttccacaccttcatcgaacaggcggtgtgcctgttcacagaggaaaccaactaccgcagctcgctctcgcccttcggcatcaagatggtggacaggctcacggggaaaccgctgcacctcgacatcagcgaccttccgatgaagcggggtatcacgaccaaccgcaacaagttcgtgctgggtccttcgggcagcggcaagtctttcttcatgaaccacctcgtgcgccaatattatgagcaaggcgcacatgtggtattggtggacacgggaaactcctatcagggcttgtgcggcatgatccgacgcaagacaggcggagcggacggtgtgtatttcacctacacggaagataagcccatcagcttcaacccgttctacaccgacgattacatcttcgacgtggagaagaaggacagcatcaagaccctgctgctgacgctctggaagtcggaggacgacaaggtgacaaagacggagagcggcgagctgggcagtgccgtgagtgcctatattgagcgcatccaatccgaccgtagcatcgtgccgtcgttcaacaccttctacgagtatatgcgtgacgactaccgcaaggaactggcacagcgtgacatcaaggtggagaagtccgacttcaacatcgacaacatgctcaccaccatgcggcagtattaccggggcggacgctacgacttcctgctcaactccacggagaacatcgacctgctcggcaagcggttcattgtcttcgagatagattcgattaaggaaaaccgcgaactgttccccgtcgtgaccatcatcatcatggaagccttcatcaacaagatgcggcgactgaaaggggtacggaaacagcttattgtggaagaggcttggaaggctctctcttcagcgaacatggctgaatatctgcgctatatgtacaagacagtcagaaaatattacggcgaggcaatcgtggtgacgcaggaggtggacgacatcatcagttctccggtggtcaaagagagcatcatcaacaactcggattgtaaaatcctgcttgaccaaaggaaatatatgaacaagttcgaccagatacaggcgttgctcggactgacggaaaaggagaagtcgcagatactctccatcaacatggcgaacaacccttcacggctctacaaagaggtgtggataggcttgggtggcacacaatcggcggtctatgccaccgaggtcagtgcagaagagtatctggcgtacaccaccgaggaaacggagaaagtggaggtttaccatctggcggagaagttgggcggcgacatcgaagccgccatccggcaacttgccgagaagcggagaaacaaggaaacaaccaacaattaaaaatgaatttatcaacgaaaaaagaaaaatgcgtatgaatttacagacagtgaaaatgctgcaagtcagcaagtgtctgatcggattggcggtcatgatgctgcaatcctgcgacgtggccgacaacctccgtgatatgctgtgcgggaactgggagagcgtggaggggaagcccgatgtgcttatctacaaggagggcgaagcctacaaggtgacggtgttccgccggagcggtctgcgccgcaagctgaaaccggaaacctatctcttgcaggaggaaaacggcaacctgttcatgaacaccggcttccgcatcgacgtgtcctacaacgaggccacggacgtgctgaccttctcgccgggcggcgactatgtgcgggtgaaaccgcagccgggacacccgacagaagaataacaaccactaaaatccaaagtaacatgagaacaagaataacaatgattatctgcctgtgcctgcttttcgcaggcagggcaagcgcacagtgggtcgtaagcgatccgggcaatctggcgcagggtatcatcaatgcctccaaaaacatcatccatacctccaagactgccacgaacatggtgagcaactttcaggaaacggtgaaaatctatcagcagggcaaaaagtattacgatgccctcaaatcggtgaacaatctcgtcaaggacgcccgcaaggtgcagcagaccatcctgatggtaggcgacatcaccgacatttatgtaaacagtttccaaaggatgctccgtgatggaaatttcagaccagaagagctgtcggcaatcgctttcggttacacgaaactgctggaagagagcaacgaagtgttgacggaactgaagaatgtggtgaacatcaccacgctctccatgaccgacaaggagcgcatggacgtggtggaacgctgctactccaaaatgaagcgttaccgcaaccttgtgagctattacaccaacaagaacatctccgtgagttatctgcgtgcaaagaaaaagaacgacctcgaccgcatcatggggctgtacgggaacatgaacgaaagatactggtaagcctatggagttcgataaccttcatcagattttacgctcactttatgagcagatgatgccgctatgtggggacatggcgggtgtggcgaaaggcatcgccgggctgggtgcgctgttctacgtcgcctaccgggtatggcagtcgctggcgagagccgaaccgatagacgtattcccgatgctccgtccttttgccatcggtctgtgcatcatgttcttcccgactgtggtgctgggcacgataaacagcatcctctcacccgttgtacagggcacggcaaagatgctggaggcggaaacgctggacatgaaccgatacagggagcagaaggacaagctggaatacgaggcgatggtgcgcaaccccgaaaccgcctacctcgtgtccaacgaggaatttgacaagcaactggaggaactcggctggtcgccctccgacatggtgacgatggcgggaatgtatatcgaccggggaatgtacaatatgaagaagagcatccgcgacttcttccgcgagatactggaactgctgttccaagccgccgccctcgtgatagacaccgtccgcaccttctttctcgtggtgctggcgatactcggtccgatagccttcgccctgtcggtatgggacggtttccaaagcacgctcacgcagtggatatgccgctacatacaggtctatctgtggcttccggtgtcggacatgttcagcaccatactggcgaagatacaggtgctgatgctgcaaagcgacatcgagcggatgcaggcagacccgaacttctcgctggattcgagcgacggggtgtatatcgtgttcctctgcatcggcatcatcggctacttcaccattcccaccgttgccggctggattatccaagccggaggcatgggcggttacggtcgcaacgtgaaccagatggcgggacgagccggaagcatggcgggcagcgtggcgggtgcagccgcaggaaacgtggtcggacgtgccgggaaactgctgaaataatcaactgacaattaaaaacgaataaacaacaatggaatttaagtcacttaaaaacatcgaatcatcgttcaggcagatacgcctgttcggtatcgtcttcctctcgctgtgcgccgtggtgacggtgtggagcgtgtggaactcctaccgtttcgcggagaagcaacgggagaaaatctatgtgttggacaacggcaaatcgctgatgcttgcgctgtcgcaggatctgtcgcagaaccgtccagcggaggcacgggagcatgtgcgccgcttccacgagcttttcttcacgctgtcacctgaaaaaagcgcgattgaacacaacgtaaaacgtgccttgctgctggcagacaagagcgtgtaccactattattcggacttcgccgagaaggggtactacaaccgcatcatcgccgggaacatcaaccaagtgttgaaggtggacagcgtggtgtgtgacttcaacgcctatccctaccgtgccgtgacttacgccacgcagaaaatcatccggcagagcaacgtcaccgagcgcagcctcgtgactacctgccgcctgctgaacgcatcgcggtcggacgacaaccccaatggcttcaccatcgagggcttcaccatcatcgagaacaaggatttacagacaatcaaacggtaacggattatgaaacggaaagtaaaaagtatcagaaaaacaatgtggggcgcatactggaagctccacgacaaacggaaacggctggtggcaaggctcaaagggtatttggacggtttgccgccggaaacacgccgccgcatcatgctggggatgctcgccgccttcgcggtgcttgccctctataccttcggcagagccgtctatgacatcggcagaaacgacggctcacgcatggaaacgggacacgccggacgggtggaactgccgaccccggtggaaacagacaatcacttaacaccttattcatatggaacagacgaagaatgaaccgacgaaagagaacaaagccgctcccgacacgggaaagccgaaaaaggggcgcgaaccgctgacagaggctcagcggctgaaacggcagaagatgatcgtgttgcccgctatggtgctggtcttcattggggcgatgtggctgatattcgccccgtcctccggcaaggaacaaccgccgggaacggacggatacaacaccgaaatgcccgacgctgacaaggcgaacaagcagattatcggcgacaagttgaaagcctacgagcatggggagatggaagagcgtcaggagagccgcaaccgtaccatcgggcagttgagcgacatgttcgaccgcgagatagcgggaacggaggacggaacgaacttcgacctcgccaatccgggcggcaaggaggaaaaggcacagcctgccgcaccgcagactatccaatcctccgctgccgcctaccgtgacctgaacgccaccctcggcaacttctacgaacagccgaagaacgacaatgccgagatggatgagctgttggagcgcatcgcctcgctggaatcggaactggaaagcgaaaaaggcaggacttcatctatggacgaacaggtggcacttatggagaagtcctatgagctggcggcaaagtacatgggcggtcagaacggaggaaagccggaacaggcggcagagccttccaccgtgcagaagggaaagaagaacacggcgacacccgtaaggcaagtgacccgccaaatcgtttccttccttgcacagcccatgagcaacgcggagtttgtcgccaccttctcgcaggaacgcaaccgggggttcaacacggctgtcggcactacagaggtatcggaccggaacaccataccggcgtgtgtgcatggggcgcagagcgtgacggatgggcagacagtaaggcttcgcctgctggagcctatggcggtggcgggcaggacaatcccccgcaatgcggtggtggtcggcacgggcaagatacagggggaacggctcgacatcgagattacctcgctggaatatgacggtacgattatccccgtggagcttgcggtctatgacacggacggacagcccggcatcttcatcccgaactcgatggagatgaacgccgtcagggaggtcgccgccaacatgggaggttcgttgggtagcagcatcaacatctccaccaatgccggggcgcagctcgcctccgacttgggcaaggggctgatacaaggcacaagccagtacatagccaagaaaatgcgaaccgtaaaggtgcatctgaaagccgggtacagggttatgctctatcaggaaaaggactgaaaacaataatcaatcaaaaaaacatttaccactaaaaatccaaaagtaatgagaaaagtaatcatcatgtttgccctcgctatgggcatcgcatctgcccacgcgcaggagaatgtaaccgttgaaacaaccaacggaagtaatgaacagccgaccttgacaaaggaggtctatccgcagaaggaggcggacggcgacctgtatcacgggctgtcacgcaagctgaccttcgaccgcatgataccgccgcacggtctggaagtgacctacgacaagactgtccacgtcatctttccggcggaggtgcgctatgtcgatttaggctcgcccgacctgattgccgggaaagccgacggagcggagaacgtcatccgcgtgaaggctaccgtgagaaattttcccaacgaaacgaatatgtccgtcatcacggaagacggcagtttctacaccttcaacgtgaagtacgccgccgaaccgctgttgctcaacgtggagatgtgcgacttcatccatgacggcagcacggtgaaccgcccgaacaacgcgcaggaaatctatctgaaagagctgggcagcgaaagcccgatgctggtgcgccttatcatgaagtccatccacaaacagaacaaacgggaggtgaagcatatcggctgcaagcgtttcggcatccagtatcttctcaaaggcatctacacgcataacggattgctctatttccacacggagataaagaaccagagcaacgtgcctttcgatgtggactatatcacatggaaaatcgtggacaagaaggtggcgaagcgtaccgccatgcaggagcagatcatcctgccgctccgagcgcagaactacgccaccctcgtgccgggcaagaaaagtgaacgcacggtcttcacgatggctaagttcaccatccccgacgacaaatgccttgtggtggaactgaacgagaagaacggcggccgtcaccagtccttcgtgattgagaacgaggatttggtacgcgcgggtaccatcaacgaacttcaagtacgctgaccatgagaaagtacatcgcaataatcatcgcgtcgcttgcccttttcacggggcaggcgcacgcccagcgatgcctgccgaaaatgcagggtatcgaggtgagggcggatatggcggatggctttaatcccggcggcaaggatggcgggtacagtttcggggcggcactctccacttacacgaagaaggggaacaagtgggtgttcggtggcgaatacctcctgaagaacaacccctataaggacaccaagatacccgtggcgcagttcacggcggatggcggatattacttcaagatactgtcggacgcccgaaaaatcgtgttcgtctatgctggggcttcggctctcgccggatatgagtctgtgaattgggggaagaaaatgctgcatgacggctccacgctgcacgaccgggacgccttcatctacggcggcgcgctgacgctcgatgtggaatgctacgtggcagaccgtatagccctgcttgccaatctgcgggagcgttgcctttggggtggcgacacgcggaagtttcacacgcagttcggggtcggtatcaagttcatcatcaactgacacgggcatggaaaggacggaaatagatgctgtcagaaggatgccgcttgcggattttctcgcacggctggggcatgagcctgttagaaggagcggtaacgagctgtggtatcttgccccgtacaggggcgagcgcacaccctctttccgtgtgaacgtggcgaaacagctctggtacgacttcggtttgggcaagggcggcgacatcttcacgcttgccggggagtttctgcaaagcgatgactttaggacgcaggcgaagttcatagcggaagccgccaacatgacggtgaccggatgggaaaaacccgcctatctcccgaagccgattgaacccgtctttgaggatgtggaggcagttccgttgtttcgttcaccgctgacggagtatctggcagaacggggcatcccttacgccatcgcatcccgtcactgttgccgtcttaactacggcgttcgtgggaaacggtattttgccgtcggcttcccgaacatggcaggtggctatgaagtcagaagccgatatttcaagggttgcatcccgccaaaagatatgtctttggtaatggctaaagaaattccggctgacgaatgcctcgtgttcgagggcttcatggacttcctttctgcggtgacgcttggcgtaaccggtaacgctgactgccttgtgctgaactccgtcgccaacgtggagaaggcggcgggattgctggacggctacgggcgcatcgactgtttccttgaccgtgacgaagccggacggcggacgcttgccgcacttgtggggcgatacggggagcgtgtcaccgaccgttcctccctctatgacggttgcaaggacttgaacaagtacctgcaactgacaacgaaaaattaaaaaacaaccatctaaaaatcgaagaacaatgaacatactgaacaacagaaacaagagaacatccatcttcaaggcggtggcgttatgcctgatagccgccgtgtcattcaccctcgtatcgtgcgacgacgacatggacattcaacagtcctatcccttcacggtggaggtcatgcccgtgccgaacaaggtgacaaaggggcagacggtggaaatccgctgtgagctgaaaaagaagggcgacttcgctaacacgctttacactatccgctattttcagtttgagggagaaggaaagttgaaaatggacaacggcatcaccttcctgcccaacgaccgctacctgctggagaacgggaagttccgtctgtactacacggcggagggtgaagaagcacacaacttcatcgtggtggtggaggacaacttcggcaactccttcgagttggaatttgacttcaacaaccggaatgtaaaggatgacggtttgaccatcgttcccatcggcaacttcagccccttgttgaaatgatgcgtgtattcatgataatgctctgttcgcttctggcggtctgttccgtatctgcacggaccagccgccaagaggaaacggacgggcaggcggcaatctaccgtctgccacttatggaacgggcttttttatgctgtcgctattttgagggctggcactcagaaaaacaccatccatacgtgggttggggtcacaaacttttgccaaacgagaagtattcagcacgaaccatgacaaaatgggacgcggatgaacttttgcggaaagacctgcgcaaatttgtcgccatgttccgtaaattcggagttgattcgactttgcttggcacgttagcttacaatgtgggaccggcgaagctgttaggcagcaagacactccccaaaagtaccttaatcaagaaattggaagctggcgacaggaacatttaccgtgagtatatcgccttctgcaactacaagggtaaacgccacgccatgctgctcaaacggagaaaagcggagtttgcgctgttgtatatcccataaatgtaaatagacaaaagaacctccgatgaaaccacaacttcatcggaggttttccggtttgttaaaattgaatttttacttctttctctttaatatgtatcacatctcccataatcgtcatagggcacattttcccattccaaggttcatcataacattcatctttatcatacttttctttttcacaaaacgaatgcaatgggcatacataaccatatttgtgcaatctcgttaaatatgaaaataatgcattgtgccctattagtgccaacatatcatcagataatttttcggaatctattgaggatgaaggtgtggattaaaatcgccactgtctgtatagctataaggcattcctaaaaaatctattaacgttttaattcgttccttagataagggttggtaatcagtaatcaaagttaagataggaacaaatcctttggcaggacgaattcgttccaaaacttcgccaatataatcgattccgactcggacacttttaaaaaagacttgtttgaatgtgtctataagagtatcaaaaaagtcacaaactgacattgcttttcccttgatgtatattttatcttcattgacgaaccgttcaaacaattctattgcagataaatccggattttcattcgcgtatgctaagttatctattagaacttcagcaggagaaaggctaaacaaagatatatagcaaatagttatcagttttatattatcagatgctattgcagaaaaatgttgttctgcaataatcttaattaaattatatgggaggtcaaattcttcatgagttgcagtttcatctatgagcatttgatacaatgctgccatactctccttaataatgttagcacccaaaacaatggtttgttttgaaccatccgtaaaactgatatctaatgttattattggtaaatttctattatttacctttttatagtttctatggatgcaaatccgttcacttacatctattttaaaattatttctccgtgtatctgaaagtgggcaatatcctgttccacattctacaatatccattttattcttcaatccttgagaataatcaatatttaatgggagagtgatagtagatgtagcattttctacaaaagcatatgtttccgccattatattatatcgaaccatactatcatatagtccccacggagttgatacattttgaagaaagtggatgtattcatgaacaagagttcctaatgttgggacatcaagttcatcgatgtttccatcaaaagaattgtgaatacgaatctgcataaacgccggctgatattcacctttactattatttcgttctgttatgatgtgcttttgacttattgttaattcacacataatattactatgattatgagtatcaatacttttacaaagatactcataatattttatatatcgctaacaagcgattgaaacaaaggtttctttgctactttctttgtccgccatcatgctcactgaaagaaagtagggcggctctcgccgcccctccactcaaaagcgtgtgtaaagtcccgtcaccatcgtgaacatttcctccaacatatcaaaatagatgccctcgtgtatggcaatgtcctttgttctgctctcgaatgtctttttgctgaatgtcctgcggtagaaacgcatattgtagaggtctgcccctgcatcatagatgatgtcaaggcggttggcacttgtcttgttccttgcaaggctcatccgtaagccgttgcccatatctatgaagtcacggcttcccgtcatggcggtgaagcgtcttccgcctatctgctgtaatatcgtctgtgctatcatatccgttgttttagggttttaagtgttggcggtgcggacaccgccaacttgttcaaaattctcgcatctcggcaatgggtgtctgtcgttgcagccactctttcacacactccatattatactcgctcgtgatgactgccgtatggctgtcggtggcggtgaaacgtgtgctttcgtaatcatctatccaccctttgagggtgttcgttccccacgcttgggcttcgtcaaagataccgtccaatgccgtgataggttcgctgaatttgactatcagcgtttgataggtcgtgttcatcggttgccctcctttccctgctttgcgttcagccacttgttccttgcggttcggcactcgtccaatgtgggtttgacacaagcgaacagttctccgtccgtatggcggtagtcgtactgcacaagtgtccgcttgcgtctgccgatacccgattggaaacgctcatatttctccgtacctgcttccgtacaggtgcttactccgttgatggtcattcgtgttgccataatgttgctttttagatgattaaaaatgtactgacagaactctgtccttcatcaccatttcggggttgctcgtgtagcgttgatgcaggtagaaatggtgtgagccgaagccgtaaaggaaaaacttgtcaagttcgtgcttctcggcaaactccttcacactccttctcaatccctcctcactcgttgtgagagtgaggagatttacaaattcaatgaacatcgtgggaattgcatcatcccacacacaaatcatgctttcgattcttacttccatatcaatgttgttttagggtttatgctatgccgctttcatccgctcacggataaggttggcgttcttgttcacaaggtctatgatgcgttcgtggtattcggtgtcttggttgtacttgccgtggcactgcaccaccttgagtgtccgcaaatccacctctacggtttcaattatctcaccgccaatccttgccgagagtatgagggtgtcggctttcttgtagtattcactgccgaacacgcagatgttctgtgccttgccctcgctgtaatactcgtctatgctttcaagcaccttgatgattatttcctcgtccgtgattaccaatccgaagaatttggatttgttggcgatgaaatcctccgcatctttttccctttgcagttgccgctgttgctcacgctcacgcctttcaatctcccagcggcggcgttgctctgctcgttccttctcgtgtatggtttcaatctttcgggttgcgttgtcgtgtgccgccatgaaatcttcggggcagatgttcttcgggttgcggaggtcttgaccgagtttgttgagcatacgcaaatagtcgcaccacatggagaagttgtctatcagatacttgtgacgcttggcaatcagatatgatgcccagcattcatcggcagtacgggcattgaaaataaagtgtttcataacctcaatctcaccgcctttcataagggtttcaattcttgggtcagaaagcaaggctttgaaaagacgcacgggggaaatgccgtggaaatcgcccttgaagccgttacgtctgagttgaggtaataccctcattttgggatatgcacagcttcttgccacaacatcatcgtataggctgttgtgcggtcttatctccatcgcgctgcacaatgcccatacatcgcagtaatagaatgtgaagccacggagcaacgccatgtctgtaaccttaccgtcgggtgaaatccaacgctgcacaacctcgtggcagtagaattgcatcggctcgcctttcctgctttcgcatctgacctgcgccacacggattacctgatagcctttgcagatggttatcacgctgaaatattgcgtttccttgtagatacgtttgcgtgtgtcctgcactttgagtttggcatggcattgggaacaggtgcaaccttcaagggtgtcgcatagtccactgtcactgtgccactcgtgaccgcagtcggagcaggtaatgttccctttcttggtgcggtagccgatatgttcaacgcagtggcggtatgcccattcaatttgtgtcgttgatatggggcggaggttggctgaaagtcttgccacctctttctgtatcttggtcttcggtttcataagcctaaatcaaataatgagggttgggggtggttttcttttctcgctgacggtctgttgcggttctgcaacttgcggagttcctcctcttggtatctgcggactgcattctgacgtgcctccgccttttcctcttccgtgagttccacaacatggttcaccaccacttggcagttcataggtttgcccacctctatctcgttttcctcatagtagtggatggcttgcccgaatatctctccgtccgtgaagccgttgcaaccacttttctgcacatggttcagaatgtgggtcacgcactcgtctatgttcttggcagggttgcggtacttcttcgcaaagagcgtatcttcctccgcccgctgttccagatacatttgtatcgttcttttgaaatggtctgttcctttcatatcgctgtcgtttttagattgtctgtttaagtatctctctccaataggtcggctctacctcgctgagaaggaagtccatgaagtccctccgtgcgtctttgtttagttcgtggtacaatcttcggaacgtttcaaaattgccgttgatgtacgtttccaccatatacacgaagatgttgtccacctcgtaatatctgcactgctgcgctaccgtcttgctgtttctctttgtcatgtcggtaagggttaaagagttaatgaccaaaggatgaagccgaagtaggcaatggtggaaaggatagccacgattacacctatcgccactcggaacactccgtttacaatctctctgatgatgccccaaaggatgccgaacaccccgaaggcggtgcgcatcatcaagccgcatatcgccaacccgatgtattgcgccacttgtctgaaatttgccgttgctgtcatatcttcgctgtttttaatttttttgttttttatgcggattcaagagctgagggagttgagtttcaaactatcttatctgcctctcgtttatccgacattttttttatgcgtctttctgtcgcatcggtcgttttcgtttcgggtgcttgaaaaggtagggattagggaatgcaaggtttttcggggaaatactacccgaagggctggagatttccgcagaaaacaggaggcttgaccttgctttcccgtccaatcccggaattacctttgcgcccagaacgaaaatgactgactgatgcggcttactgaaaggcgcaaaatggaggtaaacgaaaacagaggcagattaggtagaaaaaactttaggggaaaatccgtaaaaagaggaaaccgtctgaaagaaaaagacatcaccggaagcgtgaaaagggcaaaccacgacaaaggaagtatgattgtttccgttccgacggaacttgtccagccgggcggcaacaatcattcttcccggtttgtccggctgtgtgtgaccgcctgtttcattcatgaggcaggctgacacactctgcattcactttccgcttccggcaaaagggacagcaaaaaaagaaaaatcatctggtagcccgtaaaagcacctcttggcatagacgcaaaagaaaggggcattgcgtcatcagtctaaacatcgtttaggcgtgaggcaatgcccttttctccggctatgcggtagtcggcacacgattgttcaaaactcgtttttggcaatggtgttccgacaaacaaaaccgcttttacggaaaaatcttatgaatgaggggataaaaaacgggagtttatatcaaaatctcgaattaaatagctacttttgcataggaagagttctttgaaggttacgcaatgcgcagaaagataatgcagtagataactaactaaatcgtaacctattactatcaagagcaattaacctacgctcatttccaataaattacactcttttcgtaacttcttgagacaaatgtacatgatattttttgcaaaatacatgaattggcatttattctctttatatttgcgtataaaatagaccgatgtacacagaatatcagccctctcgtctactcgctccctatattgataattattgggaatttaagggaactccggaatatggtatgcgtatccatattttgccggatggttgtaccgatttcatttttacgttgggagaagcagtgagtaaggtaaaagaagaaacgctggtcatgcagccttatcgttcttactttgtgggtccgatgacgaaatattcggagcttgtcacttatgccgaattcgttcatcagtttggcgttcgttttctgccttgtgggttatccggatttacaaagctgcctttgcatgagtttgcgaattacagaatcagtacgaatgaaatgcaggcggtttttgacagtacctttatcgagaggttatgtgagcagaatgatgtccggggacggattcaggtcgttgaagaatatctcctggcgtatcttgcacataactatcagcctgttgattcccaagttgccgcagcggtgaatataatcaatcagtccgcagggaagcgttctgttcgtagtctgatggatgaggtatgcctgtgccagcgtcattttgaacggaagtttaaacataacaccggattcactcctaaagaatatagccgcattgttaaattcaagaatgcagtagaattactgagaaacacgacttctgtcaacctgctgactaccgccatcgacgcaggatattatgacctggcacatttctcaaaagaaatcaaaacattgtcgggcaatacaccttcatcattcctttcgcttacagttccggaggatataacgctgacttatatcgaaccttagcaccggattagtaaaagtcgattttttacaatagaacggacatctgtgccgttatctttgtggcgaaataaaataaatacaataagattatgtcaacaaaaactatgaaagagaaagcggtggagttattgcagaaatgcgaagttgtcacccttgcttctgtgaacaaggaaggctatccccgtcctgtgccaatgagtaaaattgcagcagaaggaatttccactatctggatgtccaccggagcggattcattaaagactattgattttttatcgaatccgaaagcaggattatgttttcaggagaagggggacagtgtggcattgatgggagaagtggaagtcgtgacagacgagaaactgaagcaggaactttggcaggactggtttatcgaacactttcccggtggtcctacagatccgggctatgtattgctaaagttcaccgccaatcacgcaacctactggattgaaggtacctttattcataaaaagcttgactaatcttgatctggagcgattataaaattgacaggtaacggtacatttgtgtacgaaaaaagagaaagacattcccaaagtaaggactgtttttctcttttatgtttaggctggaagacgtgtttttcgtctatctggcattcatttagaattcaaacttttccagtttcatttcagctaattcctgaatgatacctacgtattgtgcaaaatgagcggttttttcgtgtgctgccaatacttcagcattctgccatgtttcgcaaatcatgaaaacatcacggcgggtactgctttcaaaagtatcgtaagcaatgcatccttcttctttcaaagagcaggcagtcagttcttttgctgcctcaatcgctttttcgcggtttgtttcgtttacacgaacaaaaacatttaatctgatcatagttcttttattatttatgtgattaaaaagaatggtttcatcactgtgtttgtgaagaaccgaaggcaaagatagtatttttctgtagcttcccgcaggctgttttcaaattttcatataaacttcacataatcataaaaaatcggttatatttgcatctgaattctaaaagcaactattttgagcaccattcttaaatttgttatagcttaatattagcctcataaaccacaggctaatttctttcgtttgagtatttctacttgaaccggtttttcattttatcctaaaatccgcaactatcatccaatacacgattaagggtagatttatgagtcgttagtagcagctttcagtaaaaagcaacagcacaacatcaatatgtagccaccatccccttaccccacgatgcgacttgaggtaatacgcagattctaaccggaaagaaaggattcttatccgaattctgttttgaaaggtcttgcataagcccggttttcagtatagatattcagcacgtattgccttgctgtcatgatccacttggcaggtacggagatgaagctgaagacaaaagcctttatgcgactcgtttccttgagcccgaaagccttggtgtcaagcttgctaatgatggtcttatagaaattgtgtatcaatgccgtaagcagaaggaatacggtgttctctgacatgaacgacttggggagcctgttccagccgaatccgttgttcatatcatcgaatatacgctctttgcccccacgcttgttgtaaaattcgacgatgtctcttgttgatgagtcataatcgttggtaagaatgcatctgtaggtgtattcaccttcccacaagtcaagctctccatccatgcgcttttgtctctgaatgacaagacgatagcacttgccttcccatttctcaacaagaatggaattgagttcaaactggatgccgttgatttcctccgtcttccatcccctcagtgaaaacaagtcatcgtagagcgaactgcatctgttggcgcggatgtagaagtgcgtgcaatgcttctctatctcactgacaatttccttcgagcacgaaccacagtcggctctgaagcgattcacacggatgctgttggcttccagtagggcaaagaatctcttgtgggtctcagcctgataaaagcgcacatttgtgttgccatcgctgttctcgacatagacaatcatgtcaccgatgacatatacgccaggtctgtagccgaggaacttcttgtatgtcggttttgcatcatacttctctgtttcaaggaactgatggtcgaaatcaacatcgtaggtttccacctcattcagttcaccagtggaaaccaaggcttttataagcaaggcgttgagcttgtctgccgtattgaaatcataggtcttgcccttatcggaagtatatgagatgttttcctgtgtcagttccttgatggctctgaggatggtatcagagctgcatgtgcgcaaggtcggatgatacgagagatgacgcatcagatgcgatgttacatcctccacgcatgaaccgccacagaagtatacgctcatcagagaacgaataatttcgctgtactggtatccgatgatactgcggcatctctgaccaagtgtctggtcgataataggtgaaagcatggagtcaaattgctccatgattgaaaaaattcctccaaaaggtgtgagtttttcagattttatttgtacctttgccatgtcttgttacgatttacgcttgttttgatttgcaacactaagataagtgaaaaatctgacatggcaaaatcctgagcaactttttgttgctcaggaacttataaataaagttaaatcaaagtgttgcggaattaaggtttatcaattttattattcacagcatcgtttttttaagacgagtgcaatttggtattcaggcttttagtcagactccttttgacggttcgaaagctgtgggtacattgagaatgaatggaaaatttcgtaagaaatagtaagctgaacatagaaaaagaaattaaaaggattgagcaacagccgattgcccttctcgagcggataaagcagataatagatgtcatacagacatcacttactttgctgaaaagggcagttgccgaatatcaatttcagaatcctgaagaagaaattcagttctttaaagtctggaaaccgcagatttccggcttgctgatgttttatatccgtttatatcagattgaaaagaaccgtgtcggcaaatccctgtcggctcaatgcaaatatttaaagatggagctggaaaatatacagaagtcatttttgaataatagcttctatgattattatcgtgccggtcagaccgaacttgataaccaatattttatccgtgagaattatgatattctttccgatgttcattgtcatttgctggacagggattcttcttttaccaccttacacgattcaagcgttgcaatgattctggcgaatagtcatttgatagaatatgtgtcagacgagatcgattcgctgtcagacaaactgcatcttaaattcacctccatagtagacagtaagttgctgcaatggacggatagtaaagtcgccttggttgaattcatctatgcgatctatgcgggcaaatgctttaataatggaaataccagtctgaaagacatcgctttttgttgcgagatacttttcaatatcgagattggggacttttatcgtatcttcttggaaattaggaatcggaagaagagcaggacacaatttcttgataagttgaaggataaaatacagaagatgatggatgagctcgacagataaatttcacgccatcttgtgacatcttgtgaattttataaatggcttatatccaactttgctttatggatacaacatttacatgggagataaaggcaaagaattctcctttattaattaagaaatgcagtcattgcgatagtgaccggttttactgtagtgataagtttagaatgaatgcgcagaaaaagaacatcgatgtctggctgatatatcggtgtgtgaaatgcgataatacatgcaacattactttgctgtcacgtaccaaaccggatttgatagataaagtcctgtttcatagcttttccatgaacgatcggaaagcagcctggaaatatgttttttctgccgaacttgccggcaggaatcatttgaaaacggattatgatagtgtagaatatgaggttacggataacttctcgaaagaagatataatccgtgtgcccgatgcaaccataaagattcaaatcaaatatgagtttgaatttaatctgaaattgtcgtctttattaaaaaggaattttcttctttccagcactcagctaaggcgtctgtttgaacagggagtgatttcgcttctttccggtaaagagccgcagaaatataaagtaaaggacggagatatcctgttgatggataaagaacatttgcttgttatgatggactttgtggatagctttatggtaaaaacaggcattgattgattttttattactacatttgtctgatatgggacagggaattcagaaactaagtactattataaattcagagatatgagaaagttgtttttattagctattgttttatgtgtatggagtgttgttgccgatgctcaggagagtgagagaagatatattgaggtaaccggttcttctgaaatagaagttgtgccggatgagattcatcttttgattcagataaaggaatattggaaagaggaatttgtgccgaagtccaagccggaagattataaaacgaaagttccgttggaatggattgaaaaagatttgcgtcgggtactaagtagagcgggaatttcggatgaggctattcgtgtgcaggaaatcggagactattggcgtcagaaaggaaaagaatttctgataggtaagcaactggacatccggtttactgacttcgaaaagataaatgccgttattaagaagattgatacgaaaggcatcgagtccatgcgtatcggggagctgaagcacaaggatttgccgaactatcggaaacaaggtaagatagaagcattgaaagcagcacgtgaaaaggcatcttatcttgtggaagctatgggacaaaaactgggtgaggtcattcgtattgtcgaaccggcttcgagctatgtaagtccttattctctttatcaggcacagagtaatgtcagtatggggacagctgccactgagcaatatcgcgttattaaattgcggtatgagatgacggcgcgttttgctattgaataatttttttcttgctaagaattacagttcgcattacataaaactgtacctttgtatgcgatgagctattcgtctgacagctgttgaactttcgtctgacaactgttatcttttcgtctaacaactgtcagacgaaaaagaaacagttgtcagatgattatttttatgctaaactaaagttaaggtttagtataagaggactgaaatgttagcgaataaactgatagacacataaacaactaataaaaaatatactaatgagtgcattttatgatttgtatgagactccggaccctaatgatacaggggagaaacaaccccttcatgcccgcattgttccgagtggaacttattcgaaaaaagattttatagaacgcgtatcccgtcaccaaccttttccgcacaatataattgaaggagtacttggcgctgtagttgatgaactggccgaagccttggcggatggatacatcgtggaattgggcgaacttggacatttcagcatttcgttgaagtgtacccataaagtgatgactaagaaagaaattcgcgccgagtctatccgttttgacaatgttcatttacgtacttccaaagaatttaaaaagaaaataaagcgggagatagaacttgaacgagttgagaactccaatgaaaaaactcacaatgctaaaatatccattgaagaccgtctccaaatgttgcaggaatttctgaagaaaaacggaggaatcacgcgtatagaatatagcagactgaccggactcccccgattgaaagcaattgatgatttgaatactttcatcaaggagggaactcttcgcaagaggggagcaggacgaactgtcttttatgtgtggaaacagaaggaatgaaacaatgaattaaaatatatatggattaattattagaggatactacagaaaaccactcgcacactaattttgttctacctgtcagtttcttatctatcttttccaataatgaagaataatattctgtatgtatttttatccagttatccaaacatccgtctccttcgttgacagcaaattcttctgttatatcttgaaaatctacaatctctattctttcaattttcacaatacatttttctttgccctgtgagtctagtatagaagcgtattcattgactttaatttcttcttgattcataagagaataatcatataaagaagaagttgctgttttttctcctgataagaccttgtctgccaattcgtctgtatcgcatccgaactgtattctatgttttatttccatcatgcttagatagataatatcttttccccgtttttcagatattcggttagcgggattcccatatatctaacagttatacctagatttgtgatgatagaggctaccccgaaattctcacagcaatcttggcatgcctcaatcgtaattcctgattgtaacatctctaatatttcagtctgtacttgcgtatcgttggctactaatttcacagatgctccccaaagaataatatttatatgtttccaccaacctctgtttttagagtttaaggcatacattgccaacatattaaaaacggtatctttgttgtcagtcgtccaaagaatggttaatttgtcatttgcgctcataatctgttatcttttgatgattctttattttctatagacatattgtgtcactatgctatgaaacaaaagtaatgaataaaaattgaatgtcgtttattactattcttttaataacacatattaagtcagataatttgcaccttttgtttcatacgagtatctttgccttactgttctgttaaaacgataggggagaatgtatcacaagagaaaaataagagcatacatagcatggatgttattcatgacattcattcccttctttgtagtgaaaacctttcactatcatggaagtgaagatgaaacgtcatgctctcatgccgaacattcccggagtcatgccgaggattgtgccatatgtaaatactccctttctctctttacagaacctcagtcggtagaatttcactgtatattgacgctcgttccttacgagccgattacttatcaggataaggttgtctgcaaacggacttattcgcatcacctacgcgcgcctcctgccgcataattacatattcatattttctaggaagacaggttcattgtaacttgtcctcacattcattttacacattatataaaagattgtaattgatgcgtatcggaattatttcgggcgtaatagggttgtttgtaaccttacccgtccacgcacagaagtccgattcaatcaagagtatgcttttgcctgatgttgttgtgaccgagtcgtaccaacagcgtcaagccaagaagtctgcacttacggttgaagtgatagaacaggattttctgcgcaaacattttacgggaaacttcatgcaggcaatggagaacattcccggagtacaagctatggacataggctccggcttctccaaaccgatgattcgggggatgggattcaaccggatagccgtattggaaaacggaatcaagcaggaaggccagcaatggggagccgaccacggactggaactggatgcctttaatatcgagacagtcaatgtattgaaaggtccttcctcactgctttacggcagtgatgccatgggcggagtgattgatatagcctctcctcccataccttctgcgaatatgctcttcggcgatgtcaccctattgggcaaatccgtcaacggaacactggcaggttcgctgatgctgggacttaaaaagaatgcctggtatgcgcaaatccgttattccgaacagcacttcggtgattaccgcatccctacggataccattgtctacctgactcagaaaatgcccgtctatgggcgtaaactgaaaaatacggcaggagtggaacgcaatatcggccttttcacccaatatcagcgaaaaggctataaagcagactattccatcagtaatgtctatcagaagacggggttctttccgggcgcacacggtgtccccgacgcatcgcgcgtagaagatgacggagacagccggaatatcgaactgccttacagcaaggtaaatcatctgaaagtaaccacacatcagcaatatgcttgggagaaactgatcctgtccggtgatttgggatttcagaataaccatcgggaggaatggagtgcttttcatactcattacggctcccagcctgcgccggagaaggacccggataaagaactggctttcgatctgaacacatacagtgcttcggtaaaagcccgctttattggctcttcttcatgggagcatacgttggggtgggatgggcaacatcagcagaacgacatttccggctattcattcttgttgccggaataccatcgttctactaccggattgctctggcttacgacgtataagcctaataacattctctctgtcagtggaggcgtgcgatatgattatggttatattggcatctctccgcacgaggacgtttatctggcggattaccttcggaggcaaggatatgatgatgaacaagtagagtcctataaatggaacagtcatgccgtccgaaagcatttcggtgactattccttttctttgggactggtatggacaccctccgttcagcacatggtgaaagtgaacatcggacgtagcttccgcctccccggagccaatgaactggctgctaacggtgtacatcacggcactttccgtcacgagcagggagatgcttctctgaaatccgagcaaggatggcagatggatgcttcctacaacctgcgatatcacggattttccgtttccgtgtctccttttgtcagttggttcagtaactacatctttctgcgtcccacaggcgaatggtcagttctgccgcatgccggacagatttaccgctacacgggagccgaagcactgtttgccggaacggaggctacgatagacattaactttctgcgtcacttcaattaccgtatctccggagaatacgtctacacctacaactgtgacgagcatattccgttaagtttttctccgccgttcggtatgcggaatacgttgacatggcaaagaaaacactatatgctttatgcggagtggcaacttattgcccgtcagaaccgtgtagaccgtaatgaggaccgtacaccgggggctaacctgtttcatttgggtggctcgctgaatattccggttggtaggactaacgagatagaaataaccctgaccgcccgtaatatcttcaataccagatattacaatcatcttagtttttacaggaaagtagaaattccggaaccgggacgaaacttccaattattaatcaaaattccatttaaaaaattactgtaatgaaaacaaaactttacctcccgatcatcagccttctggcaatgtctgtatttgcatttatttcttgtgacgattcggatagcgataccaccaaaccggtgattgaactaagtgaaccggaagaagggcaagaactgaaaattggcgacgagcacggagtacattttgaaatggatctgtcggacgacgtcatgttaaagtcatatatgattgaaatacatagtaatttcgaccaccattcgcatggaaagagcagggctgctgctacgggcgaagccactgtcgatttcagtttcaacaggtcttatgatatctccggaaagaaaacggcgcatatccatcaccacgatattgtaattccggccaatgctactccgggcgattatcatctgatggtttattgcacggatgccgcaggaaacgaaacctacattgcgcgcaatattgtactgagcactaccgccgaaggggacgatcatcatcacgatgaataaataaaatagccagcctgccatgcaaaacgggggcgggatggagtatcttttttctcttattaatcagtgttcgtataattttctttaaaaggtgtaatagttattacaccttttgtgtttccaaagctttacttttgtgaaaaatactttttcactatgatgaagttaccatttataaaccgaatttttccttcgtacagatcgaagataatagccattatcattggcggtattattgtaggcggaggagctttatttatgtacatgcttcgggcacatacgtatctgggcgatgatccggcagcgtgtgtgaattgtcacatcatgtctccttattatgccacatggtttcacagttcacatgcacgggatgccacctgtaacgattgtcatgttcctcacgagaacattgtaaagaaatggacattcaaaggaatggatggtatgaagcacgtcgcagctttccttaccaaaagtgagccacaagtgatacaggcccacgaggccagttcgcaggtgattatgaacaattgtattcgttgccatacacaactgaatacggagtttgtaaaaacaggaaagatagattatatgatgtctatggtaggagaaggaaaggcttgctgggactgtcatcgggatgtacctcatggtggtaagaattcgttgtccgctactccggcagctatcgtccctcttcccgaatcgcctgtaccggaatggctccggaagatggttaataataaggaataagcatatacataactacgtaataaaataataaaaccgatatacaatggaaaagaaattaaaatcatggcaaggatggctgttgttcggaggttcaatggtcgttgtttttgttttaggattatgtgtttctgcgttgatggagaggagggcggaagtcgccagtatctttaataaccgcaaaactgtcattaaaggtattgaagcacgcaacgaactgtttaaagatgattttccccgcgaatatcagacttggacggaaacggcaaagactgattttgaaagcgagtttaatggcaatgtcgctgttgatgctttggaaaaacgtccggaaatggttattctgtgggcaggatatgcattttcaaaagactattccactccgcgcggacatatgcatgctatcgaggatattacggcgtcacttcgtaccggttctcctgcaggtccgcacgatggccctcagccttctacttgctggacttgtaagagtccggatgttccccgcatgatggaagcattgggagtcgattctttctataataacaaatgggctgcctttggtgatgaaatcgtgaatccgatcggctgttccgactgccacgatccggaaacaatgaatcttcatatcagccgtccggcattgattgaagctttccagcgtcagggaaaagatatcacaaaagctactccacaggaaatgcgttcattggtctgtgcgcagtgccacgtagaatattactttaagggtgacggtaaatatttgactttcccgtgggataaaggtttcactgtagaagacatggaagcatattatgatgaggcaggtttctatgattacattcataagttaagccgtactccgatcttgaaagcccagcatcccgactatgaaatagctcagatgggtattcacgggcaaaggggcgtttcttgtgccgattgtcatatgccttataagagtgaagggggcgtgaaattcagtgaccatcatattcagagcccattggcaatgattgaccgcacctgtcagacttgtcatcgtgagagtgaagaaacattacgtaacaatgtgtacgagcgtcagcgcaaggcaaatgaaatccgtaaccgtctggaacaggaactggcaaaggcgcatatcgaagcaaaatttgcctgggataagggtgctacagaagatcagatgaaagatgtgcttgcattgattcgtcaggcacaatggcgttgggacttcggtgtggcatcacatggaggttctttccatgcaccgcaggagattcagagaattctttctcatggtctggaccgtgctatgcaggctcgtctggctgtatccaaagttttagcgaagcatgggtatacggaagacgttccgatgccggacatttcaacgaaggccaaagcacaggaatatatcggtcttgatatggatgctgaaagagctgctaaggagaaattcctgaaaacgaccgttccggcatggctggagaaggcaaaggcaaacgggcgtctggcacaaaagtaaaatagggatatatgtggagcaaaccgtggagttataaagaagggctggtgattggtgcgggattactggtgataggtattttgctgcaaatggcagtgggagccatcaactggggcctgtttgcctgtccggtcaatgcgattgtgttagtggtttatatcatagcgctggtagccatgcaccttcttcgtaaacgtgtgtatctgtttggatggttgagccattattccgctgccgtttcttccctggtatgggtagccggcatgacggtgatcatgggacttatccggcaggctccttccggtcatgcttccaatgatatactgggattttcgcagatgatttcgtcctggcctttcgtcctgctttacttttggatggtcactgtattgggactgaccatattccgtgccagctttccattcaggattggcagactatcctttcttctcaatcacgtaggattgctcgtggcattgattacggctactttgggaaatgccgatatgcaacgcttgaagatgactacccgaatgggaaacgcagaatggagggctaccgatgataaaggaaaattgatagaacttccgttggctatcgaactgaaggattttacgattgatgaatatcctccgaaactgatgctgattgacaatgaaacggggggagtactccccgaaaagtctcctgtgcatttactgcttgaaaacggagtttccgagggcagtctgctggattgggacttgtttgtcgaacagtctattccgatggctgcctccgtagctacagaggacacactgaaatttacagatttccattcgatgggagcgacatatgcagtgtatctgaaggccgtcaaccgaaagaaccaacagacgaaagaagggtgggtgagctgtggtagttttctttttccttataaggcattgcgtctcgactctctgacgagtctggtgatgccggaacgggaaccgcaacgttttgcttcggaagtaaaagtctacacacaggaaggaacgataatggaaagtacgattgaagtaaatcgtccgatggagatagcaggatggaaaatttatcagcttagttatgatgagtcgaaaggtcgctggagcgatatcagtgtctttgagctggttcgcgacccgtggttgcctgtagtatatgcagggatcatcatgatgatgctcggagcaatttgtctgtttgtcaatgcacaaaagaggaaagaggaggatacggaatgagttgggaacattttatatggtttgcgatagccgcattgatttgctggggcttgggcgcgtttgctgcctgggaaggaaagaagccggtatgggcttatgggtttaccttgttggggctggctatctttttcagttttatcctcggtatgtggatttctctggaacgtcctccgatgcggacgatgggagagacacgtctgtggtattctttcttccttccattggctggtttgataacgtacgtgcgttggaaatataaatggattcttagtttcagttgcattctctcactggtatttatctgtatcaatatctttaaaccggagattcacaataaaacgctgatgcctgctttgcaaagtccgtggtttgcccctcatgtcatagtgtatatgtttgcttatgcgatgttgggagctgcggtggtcatggctgtctatctgctttggttcaaaaagaaggatattgaacggaaagagatggacttatgcgataacctgacttatgtgggcttggcatttatgacattgggaatgctgacgggagctatctgggcgaaagaagcgtgggggcactactgggcttgggacccgaaagagacatgggcggcagctacttggttctcctatctggtatatatccatttcaggctgggcagaccgttgaagagtcgtccggcattagtcattctgttagtatcatttgtcttattacaaatgtgttggtatggaatcaattaccttccatcggcacaaggagttagtgtacatacttataacttaaattgaaatatcaatgaaaacattttattggtcattcgttcttatgctattgccaagcatggcatacacacaaactacggagaaggaaaatgaattttcgatgtctatgcaaatcagacctcgtgcggagtatcgaaacggtgctttagtccctcgcaatgaagggcagaaggctgcatcattcattaataaccgtgcccgtttgtcactggactacaagcgttcggaccttgaaatcaagatgtcggcacagcatgtcggagtatgggggcaagatccgcagattgacaagaatggtcgctttatcttgaatgaggcatgggcaaagctggattttggaaaaggcttctttgcacagttaggtcgtcagacgttagtttatgatgatgaacgtattttgggcggactggactggaatgtggcaggccgttatcatgatgcgttgaaactgggatatgccaataagaataatgaaatacatgctattctggctttcaaccagaatgatgaaaaaacggcaggtggtacttattacaattcttctattggtcagccttacaagaatatgcagactgtgtggtatcactataaagcagataagattccgttcggggcttctttactgtttatgaatttagggttagagacagggaatcagctcactcaagattctcatacccgctacttgcaaacgatgggaacttatcttacatataaaaatagcggatggaacttggatggcgctttctactaccaaacaggtaagaacaaggatgccgagagtgtttctgctttcatggcaagtgctacggcagcttatgcgttcaataaaacatggggaatggttgtaagctttgattatttgagcggaaatgaagaaggtagtagtaaatttaaggcttttgaccctctttatgggacgcatcataaattctatggcagcatggattatttctacgcttctgcattcaacaaaggatttgctcccggattaatagatggtcgtcttggggctcgttttcgtgcatctgccaaggtagatatggaactcaattatcattattttgctactgctactgaagtagattttaaagaagatttgaagaagtcactcggttcggaagttgactatcagatcaattggtccgtaatgaaagatgtgaaactctctgccggttattcttttatgcttggaacgaagacgatggatgctgtgaaaggcggaaatcataagagctggcaagactggggatgggtatctgtcaatatcaacccgaaagtgttttttacaaaatggtaattgaaacctagctaggattcagattaaaccgttgatagaatataaaaagtggcacagcattaaatttaggctgtgccactttctttttattataagtatttctccagcgccattttattcagaatctcgatcttttttccttccattgtgatcagcccttccttgattatcttattgatttctttggataaagcaggacgtgatacattcaggtactcggcaagctgtgactgggtatgcatgatctctacagtcagagaatcttttttcttatgttcgaataagtaaacaataaacctttcgcgtacagtcttgcgcgacagaggtttcaaacgtgatacggtacatatattgcaatttccggcgatgcaaagaaaattgtgcaacacctgcgggtcctgactgatgactttaaaagtggaatctttggttgccatgagtaccacgctgtcttccaaagcagtaaaagtagctggcaacgtattgtttgaattgaaaaggtgaggggtggcaaaggtacgtggtgcgatgatatactcaatcatcacttcgttccccaatccgtcaatgatatccgtgcgtagttttccttccaataacacatatagtttgttgcaaggtgtaccttgcgtaacaactatttcttttttatccgctgcatagataacgaaatccagtttatccagcagagattccttaatgttcagaggtaaatcccgaaataaagggatttgaaataatttttctttatgtgcgttggtcagttgtatttttttcattgcattatgttgttcgtatcatgggcaaagatatgaattatatatgggcagagaaaatctttttttatgtttgtgccgccgaaagaccgattatggatgagatgaaaaggatattgataaaaagtaaaaatggcagaaaatgtttgaatcagtaattagggtacacatctctgtaatttatctacatttgctatatgataaattgtctatttttgcagagtgaaaaagctgattaatgaaattcaaaaaataaaagtaataaagttatggctaaaaaagttctgattatttcgtccagcccccgaaagggcggtaattctgatatgctttgtgacgaatttatgaaaggtgttctcgaaacaggcaatgaagtagaaaagatttttctgaaagagaaagtaattcatccttgtacgggatgtagtgtttgcagcatgtatggcaaaccctgcccccagaaagatgatgccgcaggaattgtagagaaaatgattgctgctgatgtcatcgtaatggcaacacctgtttatttctatacgatgtgcggacagatgaagattatgattgaccgttgttgtgcgcgttatacggaaataacgaataaggaattttatttcattattgcagcggcggagaatgataaggggatgatggaacgtacgattgatggtttccgtggcttccttgattgtctggaaaatccgcaggaaaaaggagtgatttatggaataggtgcctggaaggtaggagaaataaaagatactccctacatgcaggaagcctatgagatgggaaaaatggtgtaaacgttcgctttaggtaaacatttcccgtcttatataacaacctttcaggatggtgtcactatgctgagtatatagtgacgctatacctgtaggatagtgacactaaagcagtatgatagtgacactatagtaatgggatagtgacaccatatttttgtctggatttaatgagagaagtttagtttaacgattctgttacaataatcttctttcgttcgattccagctccaataaagtctttttagctacaagaccaccggcatatccggtcagtttatgatcactgccgatcaccctgtgacaaggaataagtattgaaatcgaatttgctccattcgaagaggctaccgcacggatagctttaggattatccagtctctgtgataattgagcataagatatcgttgttccgtagggaatgtttaataattcattccatacactcttttgaaactctgtcccgacaagaagcagaggaatatcaaacgtagtcctttgacgggaaaaatactcatctagctggctgatcgtttgcgttatcacttcagagttttctattgcgtactgagcatttagcgctttttgtattcgtttatcgattgctgctctgcgttcttcactcaccacccagtcgcacatacagagcttgttctcgaaagaaccgagtatcaatttcccgcatggagattgatagtactgtatctgaactgtatttactttaccttttgcttctttctccattttgattctttatttaaagggtttgatatggatgtaaaagtaattatttgtattcaaactacaaaatgaataattcggcaatagaagcctgaaacaaaatcttttacccttacagtcgatttaaattgattgattacttgttctgccgtagaattattataattttgtagcagaactttttatttcgtagtatttgataaagaaccaaaccacatgaactataaaataacgactcttgtcgaaaattgtgtctatggacgtaaattgcaggcagaacatggtctttccctctatattgagacaccggaaaacagattactttttgatacgggagcttccgatttatttatccgtaacgcccggttattgaatattgacttgcaaaaagtagattatttagtattatctcatggtcacagtgaccatacgggtggactacgccattttcttgaactaaatgccgaagcaacggttgtctgcaaacgcgaagtgttttttcctaaattcaaggatgaacgtgagaatggaatgaaatatacacgctcgcttgatctttctcgttttcgttttattgatgagttgactgaactggttcccggagtatttctttttccctctgtggatattatagacccgaaggatacacattttgaacgattttggattcaaaaggaagatggttctagagtccccgatacctttccggacgagttagctatggtactggttgagcctgaaggactttccattttaagtgcctgttcccaccggggtattacaaatatattgcggactgtaagaacggcatttccggaactcccctgtaatttgcttttaggtggatttcatattcataatgcagaagaatccaaatatcaggttattgctgattatttgcacgaatatttacctcaaaagataggtgtctgtcattgtacgggagtagataaatatgctttcttctataaggattttggagacagaatattttataaccatacagggaaattgattcagacggattctctgttataataatctgcgacgactaaacaagaatatataaaaacaaactggatgaattttaaagactgcatagattcttatccctttatattaatggaaggtgctttaggcgagcgactaaaaagggagtttgatttggatatcagtggtactgttgcaatggctgacttagtctatcagcagaaaggtagactggcattagaaacgctatggaatgaatatattgatattgcatataggtatcaactaccatttcttgcaacaactccaacaagaagggccaataaagaacggatttatatggctggatacaatgaatccattattgcagataatgtggattttcttcgttccataaaagaagcagcaaatgtagatatgtatatcggtggtttgatgggatgtaagggagatgcatacactggcgaagaggctctaaatctggaagaggcaatagacttccatagttggcaggccggtttgtttaaatctgccaaagttgattttttatatgcaggtattatgcctgtattgacggaagctatcgggatggcagtcgctatgtctgatacggatattccttatattatcagctttacgattcaaagagacggaaaactgatagatgggcataccattgatgatgccatacattgcattgataatcatgtgtctaacaaacctatgtgctatatgacaaattgtgttcatcctgatattgtttacgaagcactttctcataagttcaatcaaacacaaacggtaaaatctcgcttttggggtatacaagcaaatacttcccaattgtcatataaagaattggatggagcaaatcatttacatacttcttcggcagccgatctgagtgaagctattttaaagttgaaatctgattgtcatcttaaaatatttggtgggtgttgtggaacagacagcagtcacatggaaaaaatcgctaaaatatcggaagtgacttaaactaactagaaatacggtcttctcatgaaacaaggaatatagaataaatatataaacatacaataatatgaagaaaataatcatctctttagcgctggtactgactgcattatccagctatgctattacccctttgtggatgcgtgatgcacgtatctcaccggacggaaaggaaatcgtcttttgttataaaggcgacatttacaaagtccccgttcaagggggaaccgctacccaattaacaacacaagcttcttatgaggctaatcccgtctggtcgccagatggtaaacaaatcgcgtttgccagcgaccggaatgggaacttcgatctctttatcatgtctgccgatggaggaactgcacgtcggttgacttatcattctgcctcggagattccttcggctttcactccggatggtaaatttgtacttttctccgcctccattcaggaccctgcgcaaagtgccctttttcctaccggagccatgacggaattatataaagttccggttaccggaggacgtaccgaacaagtgttggctactcctgccgaatgggtatgctttgataaatcgggaaaaaacttcctttatcaggaccgtaaaggttttgaagatgaatggagaaaacaccatacctcatctataacaagagacgtttggctatacgatgcttcgaccggaaaacataccaatctgaccaatcgggaaggagaagaccgtaatccggtatatgcaccggatggtaattcggtctattttctaagtgagcgcaatggcggttcatttaatgtatataactttgccctgaacactccgcaggaagtgaaagccatcaccactttccgcacgcatccggtacgtttcttgtcaatcagcgataaaggaactttatgctatacgtatgacggagaactttatacacaagagcccaatgcccgcccgaagaaagtaaatgttgatcttgtgcgtgatgatgaaaaagagattgctactctcagattttctcagggtgcgacttctgcttctgtgtctccggatggcaagcaggtggcttttattgtgcgaggtgatgtttttgtgacttcaaccgattatgctacgaccaagcaaataacaaatactccggcaaaggaatccggtgtatcttttgctcccgacaaccgtacactggtttatgccagcgagcggaccggcaactggcaactttataccgctaagatagctcgtaaagaagaggcgaatttccctaacgccactcttattgaagaggaagtattgctcccctctaaaaccgtagaacgtgcttacccgcaatactctccggatggtaaggaattggcttttatcgaagaccgtagccggttgatggtactcaacctgaaaactaaaaaagtacgtcaggtgacagacggttctacatggtacaatacaggaggcggattcgactacgaatggtcgcccgatggcaagtggtttacgcttgagtttatcggcaatcgtcatgatccctattcggatatcggcattgtcagtgcgcagggaggtactatcactaatctgactaacagtggttatattagcggctctccacgttgggtactggatggaaatgccattctgttccagaccgaacgttatggtatgcgtgcccatgcttcctggggatcacaacaggatgtgatgctggtattcttgaatcaggatgcttacgaccgttaccgtttgagtaaagaggatttcgaactgctcaaagaatttgaaaaggagcagaagaaagcaaaggagaaagacggtgataagaaaaaggacggaagtcagtctaaaaaggaaaaggcagacaaagaaaaagataaggtagacaaagaaggagataaggaggataccgaaaaggacaaggcagacaagaaagatattgttgtggaactcagcggtattgaggaccgtattgtacgcctgactcctaactcttctgatttaggtagtgctattctttccaaagatggagaaaatctgtattatttctctgctttcgaagagggatatgacctttggaaaatgaatcttcgtgaaaaagggacgaagcgtctccataaacttaattccggctggtcatcactgatgctggataaaaaaggagatatcttcttgctgggaagcagaaatatgcagaaaatggacgcgaagtcggatgctctgaaatctatcagttatcaggctgaaatgaaaatggatttggcagccgaacgtgaggcaatgttcgatcatgtatataaacaacatcaaaaacgtttctacaatcttaatatgcacggagtggactggaatgccatgacagctgcctatcgtaaattcctgccacatattgataataactatgactttgcagaattactgagcgaatggttaggtgaactgaatgtttcgcataccggagggcgctattctccgaggggcaatggggatgtaacctctaatctgggcttattgtttgactggaattatcagggaaagggtatgcagattgctgaaatcgtagagaaagggccgttcgatcattcccgtaccaaagtaaaggcagggtgtattatagaaaagatcaacggggaggaaataactccggataaggacatcactgatctcttgaataataaggcaggaaagaaaacactggtttcgctgtacaacccgcagaataaggaacgttgggaagaagtggtaaaacctgtcacaagcggacagcttaatggcttattatataaacgttgggtaaagcaacgtgctgaggatgtggagaaatggtccggcggtcgtttgggatacgttcatattcaatctatgggagatggcagtttccgtactgtttactcggatattctgggaaaatacaataactgtgacggaattgtgatcgatacccgttttaacggaggcggtcgtctgcatgaagatattgaaattcttttcagcggtcagaaatatttcactcaggtggtacgcggacgtgaagcctgtgatatgccaagccgtcgctggaacaagccttctattatgttgcagtgtgaagccaattattcgaatgcgcatggcaccccgtgggtgtacaagcatcagaatattggaaaactggtaggtatgcctgttccgggaactatgacaagtgtgtcttgggaaactttgcaggacccttcattggtatttgggattcctatcatcggttatcgtctaccggatggcagttatctggaaaatactcagttggaacctgatatcaaggttaccaacagcccggaaactgtagtgaaaggagaggacacgcaactcaaaatggctgtggatgaattgcttaaagaaatagatagccggaagaaatagacatcctttcctcctttagaaaaaataattttagtctcactctgctctatttaaacttcttgcaatcagtggcataccgaatgaaagtgtgtcaaaagtaactaaactctcctccttcccgaaggaggagagtttagttacttttgacttttgacatacctacattgttttttgagttgtctctcacttttttcctcaatgcccgtccttctcgtgacaaagtaccttccatgagatgcgatttaccgcttctttgcctgtcacatactctgacttagtgtgtttaacaataggtgttcgtgttttatttcaccggcatcttcattgttccactcgggtgaacagtacttattacccgggtgaacggttcagttcactccggtgcaatgatcagtctacccgggtggaacgatgaagatgtcggtgagataacgcaatgatgtatataggataacgtatgggatacagtgacttaacatacaaacaacagatggctttaaacagatatagcgcactacatctaatgtactcactgtgatgtatccaaacatccctcgaagtaccaacttatttttaagcattactatatagtcaggcagatggaaacgttgctggtagtgagctggagaaaacttatttcaatacaggtaataatttgtagagagtcttccttgtcattattttctgattcaggaagctgacgatatatccggtgatgcaggcggcgataagagacccctcgcgaacaccttcgatgcattgcgaaagcaggagagagagtataactgctagagtgaccagcgtaacatcaaaacagactttgaactttccgaactttttgttataacggcgggaggcgtattttacgaaagcctctgcgctcatcattgctactttgggtttgagttcgagtacgactcctatggattgtatcatgcatcctgtgagtaataaggctattgatatcccgtaattgtcgggatgcagattactggtgagtgccatattaaaatcaatgaatgctgaaaagataaaagagaacggcaattgaaggagtatttcaatggtgtcctgtcgggtcttattttttctgatgatccagaactgtcccagaataagcagcatattgatcagaaacgtacaagttcctaatgataaagggctgttcaggcttaacacataattgatgctggatataggtgtggttcctaatgcggaacgtacaatcaacactattccggcagccagaaaatacaatccgataacaaataccaaataccttttaaaaacgtctttcattcccatatcttatctatcttatataatcgtattgttcttcattctataaagaagaatatgcaaaggtcccgtttttttgtctgatataagttatccgattccacacagtttttgtcatatccgaaacaaattgtacttttacgtcgaaaagaaggaggtataaatggtaaaatctcgtatttttgataataagcagttattaaaggaacatccggaaattcctcattataaagaggaggtagtctgctttatgagtgaatataaggacaggagctatccggaaaacgaacgttactttaatcgtgaactttatatgatactcgttcttgaaggtcgttccgagattttgttgaatggggaatttattgtgatagagcctgatatgttgcttgttcatggagcgaattatctcaccgaccatctttattcgagtccggatattaagtttatcaccctctccatttccgagtccatgcggacagatgattcttatcttacccagataacggctattctgttggcaacgatgaggcagaataaacaatataccatacagctgaccgcatacgaagctcaaatcattcgtaatgaactggaagtgttgatgcgtttgctgaatataaaacatcagtttcttttccggcgaatacaggcggcttgcaatgccttgtttttggatatagccgattttctttcccgaaagaccattataaaaaaggaggtcagtcgtaaagaccatgttttacaggaatttcatgcgcttgttacccgaaatttcagagaagagcatttcgtaagtttctatgcggataagctggccatcagtgagcagtaccttgcacgtatcgttcgtgccggaacgggaaaaagtgtgaatacgattattaatgagttactgatcatggaagcccgtaccttgctgagttccacaaaatctacggtaggggatattgcttcccggcttggttttagtgatgctgccggtttctgtaagtttttcaagaggaatatggggcagactcctctcaattatcggaagggattatggatttaagtgaaaatgaatgtaggttgatgtgatcccataacgaacggatacatcaacctacatgaaatatataatgaactggttttgacttatcagccaatgagtgataggacatcttctacgatctgttcatccgtcagatggttggcacgaagcagttcctgtatatcataacggtctacaaattcttttttagctccgtagttgagcactttcatatctgtagcgccatagtaacgggcaatcttttcaccgaaaccaccatccagaactccgtcttcaagggtaatcactaattcgtggtcggctttcagttcgtccatcagttcgctgtccacacctgtgatgtagcggggattgataagggtggcatcaatgttggctttttctttcagcagtgacagaaccgattgccctaatccgaagaaggagcctaatgcaaggattgctactttggagccacggtgggcgactttataacgattgagattgctatagtcggattccaccggttcaccgcaactgattacatctgtggcaggtacacggatagctaccggatgctcattttggtggatgctccattccagcatggcgagatattcctccttacaggttggtgccagatagaccatattggggatattgctgataagtggaatatcgaagaaacagaggtgggttacatcattcataccggataacgtcccccagaataccaacaggactgccggattattattgatacagaggtcttgcgagagctggtcgtaagagcgttgtataaaggtgctgtacactccgtaaaccggttttccgccattggctgcgataccggaagcaagtgccactgcatgctcttcggcaataccgacatctacaaactgcttgcctgcttcctgacgacggtcgggagtgaagcccagaacagcgggggtgcccgaagtaatggtaaccacacgcttgtcttctttcatctttttcagcagatattgagcggttacttcactataatcttctgcgtcgtcgttcatttttgattctccggtttctagatcaaacggagtgcgccagtgataggtttccttgtcctgttctgcaggttcgtaacctttgccttttaatgtattgatgtggactactatcggatgctgtatatctttaactttggagaaagcctcgatcagtgcttccacacagttgccgtcattcacgtacatatagtccagccccatcgctttgaagaagttgcattcacattgaccgttactgtcgcgcaaatctttcagatttttgtataagcctccgtgattttcggcgatggacatctgattgtcattgacaataataatcatgttagtaccgagctctgctacgtagtccagtccctcgaaggcttcgcctccgcttagtgaaccgtcgcctattacagcgatgatattttcgttgccacctgtcaggtcacgtcctttcgccagtccgcttgccaagctgacagaagtagaagtatgaccgatcacaaagaaatcatgttcactttcctgtggttctgagtagccggatacatgatcatattcagcaggatggagaaaagcatctttgcgtccggtcaacatcttatgtacgtaactctgatgtgacacatcatatacaattttatctttcggcgaattgaaaacatagtgcagggcaatggtcgcttctaccattccgaagttagggccgaagtgcccgccgtgtgcactcagtttttgtaagagggatgcacggatttcgtgacttaaatcattcagttcctgaaacgataacttctttacgtctgcgggagagtaaatattttctaaatacatatcaatttgtttttttatgtttatacctatatttttatttcactgcaaagatactgacggatttgaaatctgtttgtatatgaattacggattcttttacctatattacagttccgctaaaaatgggcttgataaaacataaaatacgacttcctctatatcaaccatatgctcttttgcaagcttgattctttttacctgaatatactgttgtaataggtatcgcgcacgcgtaatcattatataatagcaaaataggatgctataataatatctgttcttgtgtgatagaaagatggaaacctataatctgtaattggggtaattatacccgtaatctgtctacaatcccttcacttaattcttccgacctttgtactgtcgaatcaccttgagtatatggaactaattatataaagaatatggatagaaaaggcttcttgaaaagtacgatgatagcaaccggaagtttactgttaggcggggcggggatttgtcggtttctgaatgataaagaacccgcagatggtccgtttccccggacaatagaaaaaatacattgtggaaatatgaaaaaggtacttgttataatgagcgcggggacaaaactcggtaatacagaccggttgaccgacgcttatattaaaggactcgtggaacggggacattcggtaaccaaagtatatctgggcagtatgcggatagaaggctgcagaggttgcggtgtatgccagcggctcgctcatcaatgtgcagttcgggatggtatgcaggatatatatcctttgtttgcagaatgtgacacagtggtcatggcttcacctttgtatttctggagaatcacgtcacagttaaaagcttttatagacaggctttacgccatctctgccgacgacaagtatccgcagaaagatacggtattactgatgacagccggtgacgataatgagaacacctttgaccaacccaagcagtatttccggcttctgagccaggcattgggttggaatgaagtcggaatatattgtgccggcggttgtaccggatgcgaaaagctggcacggcaaatagataaggtacatcttgaaaatgtctataaaatgggattggaattgtaaatagcagatttaatatggaacaaaagaatcaatcaaaacttcattcgggcggtttgctcgtatttatcctcacggtcggtgtgtttggtattataaataccgaaatgggggtagtgggtatcctgcctctaatagccgaaacttttgatgtctcggtgccgcaggcaggttggacggtgagtatctttgcactggtggtagccgcatcggctcctgtcactccgttattgttttcgggagtaaaccggaagaaagtcatgttgctggcattgggattgtttacactgagtaacattatatccatgctcactaccaattttacagtactattgattgcgcggatacttcccgccttccttcatccggtatatgtttcgatggcttttacagtagcggcggcatcagtcagcaaggaaaaggctccaaaggctgtttcaagggtttttgtcggtgtgtctgccggtatggtgctgggtgttccggtgaccagctttatagctagtgaggtctcattctctatggcaatgctgtttttcacagttgtaaatgccttggtttttatagctacgattttgtttatcccctccatgccggtaaaggagaaagtatcttatggtgcacaactcagcgtattgaagagaacggtgatgtggaactctatcattgccgtcaccttgattaatggagctatgttcggcttctttagttatatgtcggactatctgaaaacagtgacggaagtatcatacagtgtgattagtgttgtattattggtctatggtctggctaatattgtaggtaatgtacttgccggaaaactattatcgataaatgcgcggcgttcaattattatcatgccttttgcattgctggtttcctatatatgtctctttataacaggagagtggattacagctatggtaatcattatcctaattttaggtgtattggcaggtatagcaagtaataatatgcaatatatgatcgcggaagctgctcccgaagctcccgactttgccaacggaatgtttctgacttctgccaatttggggacaacgatcggtacagccgtatgcggagctttcatcacgggaatgggcacacgctattctgtattcggtgcattgtttttcctgattgccagtattgtgtttgtttatttgagagttcgtgtagctcattcacagaaacaagttaaaatgaatatggcaacggaatgatgaaaaatatataatccgtaattggggtaataatgtcagtaattcatctacaaacactctctttatttcatcgtatttttgtaatgtagaaagtagacaatcaattcattaataattaaatgtaagagatatgaaacgaatattattattaaccgctgtatttattatgatgcttggaaccagtttttctttcgcacaggctgatgcggataacttttataaaagtgattgggtaaaggtagaaaaggtttctttttctaaccagtataaaatgaaagtagccggtaatctgtttttgccgaagaccatgaaagagagagagaaatatcctgccatcattgtcggacacccgatgggagcggtcaaggaacagagtgcgaatctgtatgctactaaaatggcggaacgtggtttcgttacgctgtccatcgacttgtctttttggggtggaagtgaaggtgagccgcgcaatgctgttttgccggaggtatatgcggaggatttcagtgccgcagtagattttttgggtacacgtccgttcatcgaccgaaataatataggtgtaatcggaatttgtggcagcggaagtttcgctatcagtgcggccaagatagaccctcgtctgaaagcgattgcaaccatcagcatgtacaatatgggtacagccagccgcaacggactgaaacatgcgctgactttagaacaacggaaacaaatcatggctgaggcagcagaacagcgctatgcagagtttttgggcggagaaactaaatataccggtggcactgtacacgaagtgacagaaaactccggtccgatagaacgcgaattttatgagttctaccgcactcagaggggagagtttactcccgaaggagcaaccccgacaactaccacacaccctacactttcaagcaacgtgaaattcatgaatttctatcctttcgaagatattgagactatttcgccccgtcctatgcttttcataaccggagaaaatgcccactcacgcgaatttagtgaagatgcctaccgactggctgccgaacccaaagaactgtacattgtacccggtgcaggtcatgtagacctttacgaccgtgtgggtcttataccatttgataaattggaatccttttttaaggaatatctgaagaaataagtatgaacaggaaaaacagataactatttaaataaaagacaatcgaatcatgaaacaaattaaaaatacacattacgaaggcgaacgtcctttgttcgcatcccacgggctttatttggaagaagtaaccattcatgccggtgaatcggcactgaaagagtgcagtgatatagaagcggtaaactgtcgtttcgagggaaaatatccgttttggcataatgacggttttgtagttaaaaattgcctttttaccgaaggagcacgtgccgcactctggtattccagaaatctgaagatgaaggatacattagtggaagcaccgaagatgtttcgcgaaatggacggagtcgaactcgaaaatgtacagttgcccaatgctttggaaacactctggaattgccggaatgtagaattgaacaatgtgaagatagataaaggagactatctctttatacatggagaagacatccgcatcaagaattttgtattgaatggcaattactccttccaatattgcaagaacgtagaaatccgccatgctgaaatccattcgaaggatgcattttggaatacggagaatgtgactgtatatgattctgtgctggatggagaatatctgggctggcattctaaaaacttacgtttagtgaattgtaagatctcgggcacgcagccactttgttatgcacacgatctgataatggaaaactgtacaatggcggatgatgccgatcttgctttcgaacacagtagcgtgaaggcaacgattaaaggcccggttcacagcgtgaagaatccccgtacgggaaacattgttgccgaaagtttcgggacaatcatcctggacgagaacctcaaagctccgggaaactgcgaattgaaactttgggacggactgacttgttttgattgaaatatatgaagtacaacttcgatgaaattgttccacgcagaggtacaaattcctataaatgggattctgccggagatgcggatgtattaccaatgtgggtagctgatatggatttccgtacagctccctctgtggtggaagcattgaaaaggcgggtggaacatggtatcttcggatatgtgcgtgtgcccgatgcttactatgaggcgataacaggatggtttgccggacgtcatggctggcagattgaaaaagaatggattatttatacgaccggagtagtaccggccctgtcagctgtcatcaaggcgctgacaactcccggtgataaagtaatcgtgcagacacctgtctataactgctttttctcctccatccgcaataacggatgcgaggttgttgcaaatccattgatttacatgaacggaacgtatcagatagactttatcgatttggaacggaaggcggctgacccgagtgtaaaagtcctgctattatgcaatccgcacaatcctgccggaagagtctggacaaagcaggaactgactcgcttgggagaaatctgtattcggaataatatatgggtagtagcggacgagattcattgcgaacttgtctttccgggacacacctatatcccttttgcatctgtctcagaagagtttttgatgcattccgttacttgcacctcgcctagtaaagcctttaatttggcgggacttcagattgccaatattgtttctgctgatacggatctacgaatgaaaatagacaaggcgatcaatatcaatgaagtctgtgacgtgaatccattcggagtggaagcattaatggctgcctataacgacggggaagaatggctggaagaattgaaacaatacctgtttgcgaactacaattatctaagggcatactttgatgaatatcttcccgaatttccggtgatgacattggaaggtacctacttggtttgggtcgattgttcggtattgaattgctcatcggataagatagtgaaaaccttgttggaaaaagaaaaactttgggtgaacgaaggcagcctgtatggagaggctggtgaaaggtttatccgtattaacatcgcgtgtccgcgacagcggttgatagaaggattaaacagattgaggcgggcattgaaataataaaataattgtcagtttattaataggttccccttctcactccccgtaaatacaaataaaaagaagtgatatgaaaagtcagaatccctcaaagaggaatttgccgggtgttatcatcgcttatttcctcatttatgtagtctggggctccacctatttttttataggggtggctttgaaagatttttcaccttttctgctcggagcactgcggtttacgactgcagggctgatacttcttggaatctgttatttacggggagaacaaatctttaagaaaagcctggtaaagcgttctgccgttagcggtattgttctgttgtttgtagatatggctgtcgttatgctggcacagcgctatctgaaaagtagcctcgttgctattatagcttcttctacggcactttggattttacttttggatgtccccatgtggcgtactaatttccgcaatccccttacgatagcaggcggagggattggcttcggcggagtagtaatgctttatgcggagcagctcaatgcagaatggttgcatccgcaaagtgagcgtggtatcttgctccttgttttcggatgtatatcctgggctttgggaacattgtatgccaagtaccgttcttcccgtgaggaagaagtgaatgcttttgcaggttctgcgtggcaaatgctttttgccagtgtgatgttctggatttgtgctgttgtgaacggagatgtccgggaagccgatttgagtacagtttcggccacaagctggttctccttgctttatttgatttcttttggttctttactggcatattcggcgtatgtctggctcttgaaagtacgcccggcggcagaagtgggtacacatgcttatgtcaatccttttatagcagtccttttaggagtatcttttggaaatgagcaagttacctttgttcagctttccggtttgctggtgattctgctgggggtgatgttgattagccggaaacgtaacaaaatgaaatcaacggcaatatcccgttaagcggaattgatttggcgtcatccccacaatccgtttgaacatccggctaaggtgctgcggatactggaatccgatttcgtaagcaatttggctcatagtcttgttcgaagacatgagttgttcttttgccagttcaatcattttatcctggatatattcggagacggttttaccggtttgtttgcgcaccatatcgccaaaatagttagcggaaaggaatactttatcagcgaagtacttgaccgatggcaacccttgattttgcggggcatctccttcgaaatattcgttgagcagatgttcgaagcggacaatgatgtctttgtttactccgtttcgtgtgtcgaactggcgttcgtaaaagcgcatacagtagtcgagcagcaatcctatgttggcgcagatcagtcggcggctgtgtttgtcgatggaatgttccagttcgatggtgattttttgcaggcagtccatcactgtttgccgctcttcttcggaaatatggagggcttcgttggtttcgtaggagaagaaggagtatttctttatttcttgtccgagtgcagtgccacgtataaggtcgggatgaaaaagaataccatgcgcgttgggctgaatatttggcagcatttccaggtcggtgatttgtccgggagcaaaacagacgatggttccgtcttggtagtcgtaatattggcggccgtatttaatatcaccacattttacatttttcaagtatagtgcatatacttcgtaacgaaaccacgcacgtgtgggccacgtagtggatttggccagatcgatgatgctgactaacggatgtctggtttcaagcccgaagatttcgttgtaacggtcaacgctgtctattacaatcatttctttagtattctcttccatatcataatctgtttttttaatgcgttacaaatataattcttttctctttaaaatttttactctcccatcaaaatccatgattggggtataaatatccgtaaatcgtctacatccgggctggaccattccccgtaactttgtaaccggtaatttaacattgaaaagagatagtaatatgaaaaagattctattaattccattgatgatgctgacgatgatgccgatggcggcttgcgacggctcaaacgctgatccgattcttccggaacagccgggacaaccgggaaactccgacggtggagacgaggatgattctacagacccgacaaaccccattccgggcggtaacgggcgatatctggtactttactgttcgcgcaccggcagcacggagcgtatggcgcaacagattcagcaaacactcgattgcgatatcctggaagtggaaccgcaaacaccttatgaaagcgattataatgggatgctcaaccgtgcacaggaagaactggctgctatccgtcaggggaattatccggcgattaaaacttcggttgaagatttcggcaactatgatatcgtgtttgtcggctatccgatttggtacggtagcatggccacaccgatgcagacattcctgcataatcatgcttcgaaacttgcaggtaagcgtatcgctctttttgccagcagtggcagcagcggcatctctgcatcagttgacgaggcgcggacactttgctccggtgccactttcaccgaaacactgcttctgacttcttcgacgctttcgcagatgggaaaccggatacggacatggctcgaaacactcggtgcgagtcgggaaaacaatcatccgtctacttctacgaatgtgaagattacagtcggtaaccgtaccattactgctacgatggaaaacaatgccgcagcgcaggactttctttcacgtctgccgcttgaagtgacgctgaatgattataataatatcacagagaaaattttctatccgtcgcctgcactgactacggcaggagtgccccgtggctgtgcacctgtgcctggtgatattacaatctatgtgccgtggaataatgtggcgatcttctgtaaaagcgggtcgcaaagcaatgacttgataaagattggccgcattgacggtgacggaataaatgcattgaacgttccgggcaatgtggcagtgaaattcgaacgacaataaattagcaaaatgaagaagttactgattatttttctattgtttgcagcaaccgcttcggcaaacgtaatcagaccggtcgaaccatccgctgccgagaacaatatggtgcggttgtcacgcatcataatcgatccggaacggctggaagagtacaatgcttatctgaaagaggagatcgaagtctcgatgcggttggaaccgggcgtattggtactgtatgccgtagcggagaaagaacgccccaaccacgtgactattcttgaaatctatgccgatgaagcggcctataagagtcatattgccacacctcattttaagaagtacaaagaaggtacacttgatatggtgcagatgctcgaactgattgatgctacgccactcattcccggactgaagatgaagtaaatgataggcagtactataaatctgtaattttggtttttatatccgtaatttgtattataaagagttggatcagaacagctaactttgcattatcagagagttcttaaataataaaccatggacgtcacagtatgagaaaattattttttatttttgtaacagtcatcggatttctgcaaattccgatgcaatctataaatgcacagagtatgaagaaagaagaagtacctcagaacatcagcgcgtttccgttaggaaaggaaaatacgggattcaagcaatattttacaggagaatcctggctggcaccgctgaccggtaacaaagacttgaatgtacccatgtccaacgttacttttgaacccggctgccgaaataactggcacagccatacgggaggacaaatcctcattgctgtcggaggtgtgggatattatcaggaacgtggcaaagcggcacgccgcctgctcccgggtgatgtggttgaaatagcaccggacatagaacattggcacggtgccgcccccgatagttggttttcgcatctggctatcggctgcaatccgcagaccaataagaatatttggctggaacgggtagacgaccagcagtatgccgaagctacgaaagataacggaggaaccggattaagcgccaccgaccccgaactggatgcaatattcggcaattttacaaaggaggtgcagcaatacggcaacctggatactaaaacccgcctcatggtaacattggcatccaatattgcttcacaggcacagaccgaataccggatgatgcttgaaagcgctctcaatgcaggtattactccgatagaaataaaggaaattctttaccaggcagtagcctatgcaggcatggctaaagtgatggactttgtcggcatcactaatgaggtgctgcttgcccacggtgtacatcttcctttagagggacaagcggtcgtttctgccgaaacccgtttcgacaaaggactggcgttgcagaaatccattttcggcgaacggatcgaccaaatgcataaaaacgctcccgaaaaccaaaagcatatccagcgttatctctccgccaactgcttcggagactaccagacacgcggtggactggacgtgaagacacgggaactactgacgttctccatccttgtttccttgggaggctgtgaatcacaggtgaaagggcacatacagggaaatgtcaatgtaggtaataataaagatactttgctggctgtcgtgacgcagcttttgccttacatcggctatccacgtactctcaacgctatagcctgcctgaatgaagtgattccggaaaaataacaaagacgttcatatatcccggaaagcaggcggttaaaatccatcagggacttgacaaacgccattttatgttgtatatttgtagttcgggaaagtatgaaaccaatgaataatgaatgaaaaaacagataaaatatgagtgtaaaacgaatgataaatggtataatattaggactaatataacatatttctttagctcgttctagagattggaaagataaatatagagcaaaggttgcaaacttcataaagtttgcaaccttttttgttgcataattttgattcattccccatgattttttatttttgagtttataataaacgaggggggcgtttataataaacggtcacagaatttattataaacgtgatctatgtttatgtggtaacttgttctcttttttcgtatcttctttccttgaagaacagaaatccacgtacttatggtaataatagctgatattatgcttgagtaatttttctatgcatatctcccgtttgtcgggaacttcgtagagcaggataataaaaccgttgtcggataatcgattcactgtaagatttgttatctttgcaaaggattcacttattaaagagaagaaattatggatgtcattgaccgtttgaaaggtccccgccgcaatcttcctatcggaatacagagttttgaaagacttcgtcgtgacggttatttatatgtagataaaacagcatttgtctacgaactagcctccacaggcaatccgtatttcctgagtcgcccgcgtcgttttggcaaaagtttgttgctttccacactggaagcgtatttttgtggaaagaaagaactttttgaaggactagccatcgagcagtatgaaactgaatggaacgagcacactgtactgcatcttgatttcaatttcaatgctgaggattactctgatattgaaggactgaaaaatggacttgaattgtaactatgtagttgggagagctgatggatgccgcatggtgaaaataggcgcggagttcagcaaggaagaacgcaacttgagtcgctggctggtggagaaaggataaatatgatgtatgtcccatttttaataattgcattggcctcgatgagtataaattccatcaaatagagaaaaaagtgcataggataatgaaataatatgcagttttcggacatatttctgcatctaaataatcattatatgcattataacaagcaatggtaagcgtcttccctttaaatgaaaccctgccttggttttaaaccaacggaccgttggtcggtgagggagcgttcatttctttaaaagaatggagtaaaacctctttttgagcgctactttgtgctggaaacctcttttttatggataagtttaaactgttaatatgaaatccgtttttcgtatctactgttcttcgtgaatgaaattatgactggactgcatcttattgctgcatcatgacccttattgtttttctttcgacaattgctgatggaaattgcagccgattttatttttgtacctctgctttcactgcatattctgtgttatttgcttgtatgatgttcattatctcatctataggtctatttttaatattcctaagaaacaaaatagatgttaattcggctcttgctccgtgaactaataattcatattgtatgttgtttaaagtgaataacgaaataaatgatgaactaaaaagttaggcatgagcaaataaaacatttctaatgatttagcaaatgaaacattacaatttaaaacgtatgattatgaagaaatctattattctattagctatggtattgggcgcatttacagcaaaagcccaatctgttgtagaaggtacaaagtttgcagataattggtctgtagaagtaaatgcaggtgcaatcactcctctcactcacagcgctttctttaagaatgcacgtccggctttcggagttggtctttccaaacagttaactcctgtcttcggtttaggatttcagggtatggggtatatcaataccactccaagtaaaacagcttttgatgcctcggatgtcagcctgttgggtaaagtgaatctgatgaacctgtttgctggttacaacggcactcctcgtttgtttgaagtggaggcagtagccggtgcgggatggttacattattatgtgaatggtgatggcgaccagaactcatggtcaacccgtttcggattgaatctgaactttaatctgggcgaaagcaaggcctggacattgggactgaaacctgccatcgtatatgatatgcaaggggactttaatcaggcaaagagccgtttcaatgccaataatgcagcatttgaactgactgccggactgacttaccacttcaagagcagtacaggaaaccgttacttcaccgaagtaagagtttacaaccagggtgaaatcgacgatttgaatgcttctatcaatgccctccgcggacaggtgaacaataaggacggcgaactcaacagcgccaaccaaaaaatcagcggattgcagcaagaactggaagaatgccgtaccaaggtcgttccggtggagactgtagtgaaaactgcccgtgttcctgaatctatcattactttcagacagggtaaatcatcggttgatgcttcacagttgccgaatgtggaacgcgtagcttcttatctgaagaaatatgctgatgcaaaagtagtcatcaaggggtatgcttctccggaaggtagtgctgaagtcaatgcaagaattgccgctgcacgtgcggaagccgtaaagactattctggtcaataaatacaagatcaatgcttctcgtatcactgccgaaggtcagggcgtaggtgacatgtttaccgaaccggattggaaccgtgtaagtatatgtacgattgaagactaaaaacaagagatgtaaatagaatggtgagggctgctccgtaaaagggcagcccttgctgtatatattcatttatgcccttctgtttgtgaataagtaatagtaatatctgtcggccagacaggaggtgatagcagaaaatcgggcaaagtcattgtttgtctgtctaaagtgactacttttggcaaaccatactattaaggtatggccgaagatgatgaaagagcagaatataccccaagacagtttgatagccggctatcttccggcagattattgcgattctttttcaaggaacgtagtcagtgaaaaagcaatcacttccgatgagttttttgatatggcttttacccaatctcccggttgggtgaatggattgatgaagttaaggaatgcgatagtcaagccattgggtttggaggttggtatgcgttttgaagatacaatctgtgagaaaaatcagaatgaggttgttttcggtatgcctgataagcatctgacgtttcatgcatctttgtggcatggggagaagaaagctgacggacagacgtttacaataacaacggttgtaaagtataataattggtttggccggttgtacttcttctttattcgtccttttcataaaatcatcatccgttctatgctgaaaagaatagcgaagcgcttggaataaaactacatttatggatatacatgatataattgaccatatatacaaactgccggatgcttcaaaggaggctttactaagcgatgctcccgaagtagcctatcctaaaggcttccatctgttccgggcaaaccataaaagctccaagttctatctgatgaagaaagggatgttgcatgcctatacctatcaatcggataagaaagttaccttctggttcgggaaagaaggagatgcaatcttcccgttgcaaactcttcatgataatcgggcaggatatgagaatattgaacttttagaagacagtgtcctgtatgaactcagtgtcgataaattgcacaatctctatctggaagatatacatatagccaactggggacggaagtttgccgagagagaatgcatcaaatcggaaaagttgtttatatcaaggcaattcaaaacttcattggagaggtatcaggaactgatatccgaatatcccgatatacttcaacgtgtgccattgggtattatagcttcctatttaggcatctcacaggtcaatctaagcagaatccgtgcgaagataagatgattttttaaactttgtaaaatcccttttttacaaatgtaaaatgaagggcaccggaaattcatgacctttgcaatcaaaaaaagaagtgttatgaattggattcttttgattttggcaggatgccttgaattggtctttactttctgtctgggaaaaataaacagagtagtaggagcagagaaatatatgtggtcattcggactgctgatatccctgtgtgtcagtatgctccttctgataagggttaccaaagcattgcccgttggtacggcttatgctatatggaccggtatcggtgccgccggtacggtgctgatcggtatctttttctttaaagagccggcaagctggggcagaattttcttcatcttcacattgatttgctccattgtaggtctgaaattggtatcacattgataccttatggtatcataaaaaaataattatcgattataatttggtagttatgaaaacaaagcccatatttgcaccccaaaaatagggacaggcatagaaaatcctcatcggagggtgctataatagataattatagtgctggataagatgaatggtgtgaatcattcagcttgtccggcacttttttattttgtaacaagtaagataagaggagtaagtattgaaaaactatgaaggagttaaatttgacacaagggagtgttccgaaagtattactgcaatttgcggttccttttctgattgccaatgtgcttcaggcactttatggcggggccgacctttttgtggtgggacaatacgatgattctgcaagtgtggcggctgtggccatcggcagtcaggtgatgcagacaatcacggggattattcttggcattacgacaggaacaaccgttttgattgccatcgctaccggagcaaaggatgacaagaaagtagctttcaccatcggttcgtctgtatggttgttttcaataatcggggtgctgcttactttggtcatggtggtttttcatggtcggatagcagagttaatgcatacgccgatagaggcgatggcggatacgaaaagttacatccttgtatgttcggccgggatattgtttatagtaggatataacgtcgtatgcggtattttgcgcgggttgggagactccaagacgccgctttattttgtagcgctggcgtgtgtgattaatattgtactcgattttatactggtaggatatttccatttgggagccacaggagcggcagttgccaccataacggcgcagggagtcagcttcgtgatctctctttggttcttatatcggcacggatttcattttgagtttacccggaaagatatccggctgaaccggaacttggccaagaaagtcatgacattgggagcacctattgcattgcaggatgcgctgatcaatatctcgtttctgatcattaccgttatagtcaatcagatgggagtgatcgcatcggcttctttgggtgtcgtagagaagattatagtgtttgccatgctacctccgatggcaatctcatcggcagtagcgacgatgacggcacagaactacggagccggacttatacagcggatgaaccgctgtctggcttcggggataggaattgcacttgttttcggtgtatcggtttgtgtgtattcacaattcctgccggaaacgcttaccgcgttctttaccaaagatgctgcggtggtatcaatggcggcggagtatctgcggggatatagtatcgactgtatcattgtaagttttgtgttctgcataaactcttacttcagcggacagggaaattcattattcccgatgattcacagtctgatagcgactttcctgttccggattccgttgtcgtactggtttagtcagatagacagttcttccctgtttatcatgggctttgcaccgcctgtttcaacagtggtttcattgttgatctgtatctggtatttaagatatacccggaagaaagtttatttgaaaggcacaatgatgcctgctatgtcgaattaggtgtttttaagtggatatattaactaaaatcaatttgtatggaagcttatttgaagaaactctgttttgagtatcaggttgaagaaaaggaagtgaaagagctgttggctcgcatggaaagagtgtatctggataaaggagaaacgattgcttctgctacaatgcccgagcagagcttgtacattatcgtttccggtatcctgcatacatttactacccagcagggagaggacaaaaccgtcaggttcctgtccgaaggtgacgctatattgtgctacaatacaagtaagcattctgtcaaaacactgacaaggtgtgtggcctattacatcagcgaagatgagattgaggaattgtgtgcaacgtccatcacgttttccaatctgattcgtcagatgatggaatatcagttttacttgaaagaggaaatgagtgtgaatgcacgtaaactgacgatcagagaaagatacctctctttattatcagaaattcccgatattctgtacagagtccctttgaagtatattacttattatttgggggccgatgtgacaagtctgggatatctggccggaagctgtaaataagaaacgtctcgttctctatatttgaagatattccttattaaatagtctattgttacctcggtgcttctcaaaaccggaaagtctttggattatttgataaggaatattatttttgtaatcgaaatgaaaaacttgattccccgatatactttctacaagaataagtatggaagtgaacttttgatagatgttgtcgaactgaaatacgtaaagaagttcctcgctcagagttcagtccacacgttgacttactatgatatcacgtttgtcacagaaggggagggcaggttttcgatagataatcagactgatgaggcggcttcccgtgatgtgtttttctctaaaccgggagagattcggaattgggatacccgccacatagtcaatggttatgctttgatttttgaagatgagtttttatcttctctttttaaggattctctctttgtgcagcatctatcattcttccaatcgggaaagacatcatccaaattacagttgccggatgaactttatatgcgtatccttcagatattgcacaatattaaaacggagattgattcgtacagacagaatgatgtgtatgtattaagggcattactttacgaagtcctgatgttgttggaccgggaatataagaaagtgaatatggaagaagaaactacacccaaagaagtcggtaatatccatattgacaaatttatgaagttggttgagagccatttgaaagagcagcattctgttcaatattatgcggataaactttgtattacccctaactatctgaatgagattataacctcaacaaaagggattagtgcgaagcaatatatccggaataaagtaatggatgaggctaagagactgcttacttatacagatttccctatatcggatattgcgtttgaacttcatttctcgaccgtctcttattttatccgtagcttccggcaacatactggagaaacgccattgctctatcgaaaaacgcataaaccgtaaaaagtgatatttctccctttctttctgttgcactgattgtcttctatatccctactttcgcgtcagataataaccaattaaaataactgaacgatgagagatgcggaaaaaacagtagggaacatgattgataagctgaaaacggcctttatcggttccatagacagtgaaggatttcctaatatgaaagctatgttgcaaccccgaaagagggaagggataaagacgatttatctgactacaaatacttcgtcaatgcgtgtggcccaatatcgtgagaacaatcatgcctgtatttacttttgtgatacgcggttctttagaggggtgatgctgcgcggtactatggaagtgctgaccgatcctgccagtaaagagatgatatggcaggaaggggatacggtgtattatcccgaaggagtgacagaccccgattattgtgttttaaaatttacagcgatttccggaaggttttacagtaactttaagtcggaaagtttcactgttgaatagaatcagtaataatggttgaacaacccgtaatttatctactgtcagatgtatgtttcttccttaattttgtactgcaataagatcaattcgactatcgatcttgttattgataggtatataggtattgaatataataattaaaagtacatttatggaaacaataagattgaacaacggtgttgaaatgccgattttaggctatggtgtatatcaggtgactcctgaagagtgtgagcgctgtgtgctggatgctattagtgtcggttatcgttctattgatacagcacaggcatattataatgaagaaggagtggggaatgcagtcaggaaatgcggggtaccacgtgaagaactgtttatcaccacgaaagtatggatttcgaacggtggatacgaaaaagcaaaagtttctattgacgaatccttgcgtaagctccaaagtgattatgttgatttgctgcttattcatcagcctttcaatgattactatggtacataccgtgccatggaagaggcttacaaggacggaaaagctcgtgccattggcgtcagcaatttctatccggaccgttttatcgacctggcggaattttgtgagattaaaccggcggtgaatcaagttgaaacacacgtcttcaaccagcaagtgaaaccgcaggagattatgaagaaatacggtacgaaggtcatgtcatggggaccatttgcggaaggacgcaataattttttctctaatgaagtattgaaagcaattggagaacggtatggaaaatcggttgcacaggtagctctgcgctttcttattcagcgtgatatcatcgttatcccgaaatcgactcgcaaggaacgcatgatagaaaacttcgatgtatttgacttcaccttgtctgcaaaggatatggaagagattgccggactcgataaaaaagaaagtctgttcttctcccattatgaccctgaaatggttaactttctgattaatttataatagagggaatatgtaggcggaagatgtttagaaaagaatcgtcaggaaagattaatctcttctgacgattcggaatattggaacgtagcgaaaaatggaactttattatcccaatgttctccgtatattttgtctatttgggtatgaggctatttttatatctaatgttagttatccggtaattgttaaacttaaccttgcttttattactccggacagaatccgtttttataaaacagataacttttttctattgcttcggctgtatcagcttctaatgcatatagtatttctctgcaaaattccagttgtccggttccgttagcggttatgatctttccatctcttacagcttgctgatcaacgtagttcgaatcacctgtatatctctctccgacatgttgtttcagataatcgattgtattactcgtatgctttacgttattgagaaatccatgcatagcaaggaaaacggaagcattgcatattccgccaaccactttcttatctttgatagctttttctattagcgggactattaattcagcttctggtgaaaaccagctcatgccgccaattaatatcagacctgcataatcttccggcatatctttcaaatcataatcaggcaatactctgaatccccctattgaagagacaggctctttggttatagacaaggttttcactttataaggaacaggacttccgggcataacaccctgattcaggcaggcagctataaatgcgccttcccagtcggcgaactcatttaataatacaaaaattacttctttcatatatcattctattttctttatgtatgcaaaggtgctatttaaaattgaataacccagatgatgcagtgaattattatcttttttatatatgactttataggtctgatgtccgatggcgggtaacagaatgtttaagatatccgtcagtcttagtcgtagactgtagctgttagcgatcttggtttcgtgtaatgcataaaaaaaagtctttgattatcaatgtaatcaaagacttttttactttcttaagaagcggtgcgtacgggactcgaacccgtgaccccatgcgtgacaggcatgtattctaaccaactgaactaacgcaccaaatattaaagactaattcattttatttctctttgcttcttacttaaaagaagcggtccggacgggactcgaacccgcgaccccatgcgtgacaggcatgtattctaaccaactgaactaccgaaccagaatttcattttgttaatctgcatctctctcgattgcgggtgcaaaggtagttgttttttgtaaatctgcaaatgttttgatgaaacttttttccaataaaaagcaagaaaaaagcttagtgtctcattttgagtacttttataatgaaaaaaaatattagttttttcttcagtcaggatggtgacactatccggtcgtcatagtgacactatcacgatgggatagtgtcattatccggaggcgatagtgtcactatcctgaagtttgtcatcttcttctttggaaatagtcttggatatctttctatctgtaagaaatcaccgtttttatatcaactttctgcttgaataattcgtagttttgcaataaatcgttatttttgcgcactaaaattagataggtggaagaatttccgcccggaatagtaaattagtaaaaagaatgatgactacagccaaactgttattgcactgtcccgacaaaccgggaatcctcgcggaagtgacagactttattacggtaaacaaaggaaatattatctatctggatcagtatgtagaccatgtggagaacatcttcttcatgcgtatagaatgggaattgaaagattttctggttccgcaggaaaagattgaagattatttcagaacgctatatgggcagaagtatgaaatggatttccgtctttatttctcggatgtgaaaccgcgtatggctatattcgtttctaaaatgtctcattgcctgtttgatatgttggctcgctacacggcaggagagtggaatgtagagatacctcttattataagcaaccatccggacttgcagcacgtggcagagcgtttcggtattcctttctatttgttccccatcaccaaggagaccaaggaagaacaggaacgcaaagaaatggaattgcttgccaaacataaaattacattcatcgtgttggcacgttatatgcaggtgatttccgaacagatgatcaatgcgtacccgaataagattatcaacatccatcattccttcctaccggcatttgtgggggcaaaaccttatcatgccgcattccagcgtggagtgaaaattatcggtgcgaccagccattatgtaacgactgagctggatgcaggtccgatcatcgagcaggatgtagtacgcattacacataaggactctatagaagatcttgtaaataaaggaaaggacctggaaaaaattgttctttcgcgtgcggtacaaaagcatatcgaacgtaagattttggcttataaaaataaaacagtaatatttagctgatgaaagtagcagttgtaaaatacaatgccgggaatatccgttctgtggactatgctctgaagcggttgggagtagaagcagtgattactgccgataaagaaatacttcaatctgccgataaagtgattttccccggagtaggagaggcgggaactaccatgaatcacctgaaagcaacagggctcgacgagctgatcaagaatctgcgtcagcctgtgttcggaatttgcctcggtatgcagctgatgtgccggcattccgaagaaggtgaggtggactgcctgaatatctttgatgtagacgtgaaacgttttgttccgcagaagcatgaagataaagtgccgcatatgggctggaatacgattggtaagacaaacagcaaactgttcgaaggattcaccgaagaagagtttgtctactttgtacacagtttctatgtgccggtttgtgacttcactgctgctgaaaccgattatatccatccgttcagcgcggcattgcataaagataacttttatgccacccagttccatccggagaaaagcgggaagacaggtgaaaggattctgaggaactttctggatctctaataaacgttgcaacagtttataataaactccgctatagtttataataaactcggtcatcgtttataataaactatttccggcttttcggagaagaagaaaaggacaggcataagaagatggagtgaacagctaaaatagtaaatcgtaaatgatcaaattgtatataaacagatgatagaaattattccagccattgatattattgacgggaaatgtgtacgcctttctcagggagattacgatagtaagaaggtctataacgaaaatccggtggaagtagccaaggagtttgaagcgaacggggttcgcaggcttcatgtggtagatctggacggagccgcttctcaccacgtagttaaccatcgggtattggagcagattgctacgcgtacctctttagtagtagattttggcggtggagtaaagagtgacgaagatttgaaaatagcttttgaaagcggtgctcagatggtgacaggcggaagcgttgccgtgaaagatccggagctgttctgccattggctggaagtatatggcagtgagaaaataatcctcggagcagacgtcaaggaacataagattgctgtaaacggctggaaagacgaaagcgcctgcgagcttttcccatttctcgaagactatataaataaaggtattcagaaagttatttgtactgatattagttgtgatggaatgctgaaaggtccttctatagatttgtataaagaaatgctggagaagtttccgaatctctacctgatggctagtggcggagtgagcaatgtggatgacataatcgccttgaatgaagccggagttcccggagtcattttcggtaaagcattgtacgaagggcatataacattgaaagatttgcgtatatttttataatcaggagtgctaaaatgaaaggaagcaccctgttataatgaaaaataaggaagcaggttctcggattagtagaatctaaattgtcaaatagtaaataagatagaattgtgttagcaaaaagaatcataccctgtctggatataaaagacggacagaccgtaaaaggaacgaactttgtcaatttgcgccaggccggtgatccggtagagctggggcgggcttacagcgaacaaggagcagatgaacttgtgtttctggatattactgcaagtcatgaaggacgtaagactttcacggaattggtaaagcggattgctgccaatatcaatatcccgtttaccgtgggcggtggcatcaatgaattgagcgatgtagatcgcctgctgaatgccggagcggataagatctcgatcaattcttccgccattcgcaaccctcagctgattgatgacattgccaagaacttcggttctcaggtttgcgttctggcggtagatgccaagcaaacagaaaacggatggaagtgttacctgaacggcgggcgtatcgaaaccgataaagaattgctggcatggaccaaagaggctcaggagcgtggagcaggcgaaatcctgtttacgagcatgaaccatgatggggtgaagaccggttatgcgaacgaagcgcttgcttccttggccgatcaactctctattcccgtgatcgcttcgggcggggcagggctgaaagaacacttccgtgatgcttttttagtaggaaaagcagatgcggcgttggctgccagcgtttttcatttcggagaaattaaaattcccgaattaaaatcgtatctttgcggcgaaggaataaccatcagagggtgaggcggcatgggctcacacaaacggtatagtaaattgaaatagtaattagaacttaatataagatggaattggatttcgataagatgaacggacttgttccggctatcatacaggacaacgagacacgcaaagtcttgatgctgggcttcatgaacaaggaagcctacgataaaacggtggaaaccggaaaagtaactttcttcagccgtaccaaaaatcgtctttggacgaaaggagaagaaagcggcaacttccttcatgtggtatctatcaaagcggattgtgacaacgataccctgttgatccaggcagatccggcaggtcctgtttgtcatacaggcacagatacttgctggggtgagaaaaacgaagaaccggttatgttcctgaaagcattgcaggatttcattgacaaacgtcacgaagaaatgccccaaggttcttacaccaccagcctgttcgaatccggaatcaacaagatcgctcagaaagtaggtgaggaagctgtcgaaacagtgatcgaagctacgaatggaacaaacgaacgtctgatctatgaaggagccgacctgatttatcacatgattgtattattaacttcaaaaggctatcggatcgaagaccttgcacgcgaattgcaggaaagacatagcagtacatggaagaagcattaattcaatataaaaacgtagaaatccatcaacaggaactctgtgtactgagcgatgtcaatctggaattgcacaaaggagagttcgtctatctgatcgggaaggtaggttcggggaaaacgagcctgctcaaaaccttttacggcgaactggacgtaatcgacggcgaagcggaagtgctgggctataatatgcgttcaatcaaacgcaagcatatccctcagttgagaagaaagctgggaattgtgtttcaggactttcagctgctgacggaccgtaccgtttacaacaatctggaatttgtgcttcgtgccactggctggaagaacaaacgggaaattcaggaaagaatagaggaagtgctcgacctcgtgggaatgtccaacaagggctataaactccccaacgaactttccggcggcgaacagcaacgcatcgttatcgcacgtgccgtgctcaattctccggctattatcctggcagacgagccgaccggaaatctggatgtggaaacaggcaagtccatcgttgaattgttgcacaacatctgcgaatccggttcgtcggtagtgatgacaacgcacaatctgcaattgctgaaagaatatcccggcagtgtataccgctgttccgaacatcgtataacggatgtgacagacgaatacatgcccagacagagaacaatagaaatagatttaaatatagataactaaaacagtaacgaaaatgaaagttttaaagtttggaggaacttccgtgggttctgctcagcggatgaaggaagtagccaaattgattaccgatggtgaacagaagattgttgtcctttctgcaatgtcaggaacaacaaatacattggtggaaatttcggactatctgtataagaagaatccggagggtgccaacgagattatcaataagctggaatcaaaatataaacagcacgttgatgagctttttgcaactcaggaatataaacagaaaggtctggaagtcatcaagtctcacttcgactacatccgctcctatactaaagaccttttcactttgttcgaagagaaagtggttttggcacagggagagcttatttctacggctatggtcaacttctacctgcaggaatgcggtgtgaagtccgtattgcttccggctttggaattcatgcgtactgacaagaacgcggaaccggaccctgtatatattaaggagaaactgcagacacaactggaattgtatccggatatggagatttacatcacacaaggtttcatctgccgcaatgcttacggtgagatagacaacctgcagcgtggtggcagcgattacaccgcatccttgatcggtgctgccgtaaaggcttccgaaatccagatatggacggacatcgacggtatgcacaataacgacccgcgcattgtggacaagacagctccggttcgtcagctgcatttcgaagaagcagccgagctggcttacttcggtgcaaaaatcctgcacccgacttgcatccagcctgctaaatatgccaatatacctgtacgtctgctgaatacaatggacccggatgctcccggaacactaatttctaatgacacggagaaaggtaagattaaagccgtagctgccaaaaacaatattacagctatcaagatcaaatcaagccgtatgttgcttgctcatggtttcctgcgtaaagtattcgagatctttgaaagttatcagacttctattgacatgatctgtacttcagaggtcggtgtatctgttacaatagacaacaccaagcatctgaacgagattctggacgacctgaaaaaatacggtactgtcactgttgacaaggatatgtgtattatctgtgtagtaggtgacctggaatgggagaatgtcggtttcgaagctaaagcgcttgatgcgatgcgggacatacctgtgcgaatgatttccttcggaggaagtaactacaatatttccttccttatccgggattgcgataagaagacggcgttgcagtcgctgagcgatatgcttttcaacaacaaataattccacaaataatacgagcgcttttattgatactgataaaagcgctctttttaactaactaaacaagtttcttgaattatgaaaggaatatttccaatcgataaattccgtactttgcagacacctttctattattatgatacgaaagtgctgcgtgatacattgtcggctattaaccaagaggttgccaaatatcctagctattccgtacattatgccgtgaaggcgaatgccaatccgaaagtacttaccattatccgtgaaagcggaatgggagcagactgcgtgagtggcggagaaatccgtgccgctgtccgtgccggattccctgccaataaaatcgtttttgccggagtcgggaaagcggattgggagatcaacctcggactggaatatggcatcttctgtttcaatgtagagtctatccccgaactggaagtcatcaacgaactggctgccgctcaaaataagatcgctaatgtcgctttccgtatcaatccggatgtcggggcgcatacgcacgccaatatcaccaccggtctggctgaaaacaaattcggtatcagtatgcaggacatggacagggtgatcgatgtggctttggaaatgaagaatgtaaaattcatcggtctgcacttccatatcggttcacagatattggatatgggcgatttcatcgctctttgtaaccgggtgaatgaattgcaggacaagctcgaagcccgccgtattctggtagagcatatcaatgtcggtggtggtctgggcattgactacggtcatccgaaccgccagtccgttccggacttcaaaagctactttgctacctatgccggacagctgaaactgcgtccttatcagacattgcacttcgaactgggacgtgcggtggtaggacagtgcggctctctgatatcgaaagtgctgtatgtaaagcagggaacgaagaagaaatttgccatcctcgatgcaggtatgacagacctgattcgtccggctttgtatcaggcttaccacaagatggaaaacattacttcggaagaacctgtagaggcttatgacgtagtaggtccgatctgtgaatcatcagacgttttcggtaaagcgattgacctgaacaaagtgaagcggggggacctgattgcacttcgttccgcaggtgcctacggtgagattatggcatccggatacaactgccgtgaactgccgaaaggatacacttcggacgagctggtgtaaataaaatgtgaatgtagtttaaaaatgcagggagcttggaacaattttaactgaaatcttgttatttttgtaatgagttcaaaagaaaactacattaacaacttaataaaaatatacgattatgatttcagaaaaattacagaaagcaatcaatgagcagatcactgctgaaatgtggtcttctaacctgtatctggcaatgtctttctactttgagaaagaaggtttcagtggctttgcacattggatgaagaaacaatctcaggaagaaatgggacatgcttatgcaatggccgattacatcatcaaacgtggcggaactgctatagttgacaagattgatgtggttcccaatggctggggtactccgctggaagtgtttgaacacgtttacaaacacgaatgccatgtatctgcattggtagacaagctggtagatgtggctgctgctgaaaaagataaagctactcaggacttcttgtggggatttgtccgcgaacaggtagaagaagaagctactgcacagggaattgtggataaaatcaagaaagctggtgataccggtattttctttgttgattcacaactgggacaacgctgataatgatctgaaaaatagaaaattatataagagaagctgtttgggtttatattcagacagcttctttttttatcttacttatcaacttccctgccgggctatttctttatctttcctttttccatagctcccagataaatctccagcgagcgggtagaaatctgtatttcgcggaaggatacacccaaagaagcgattaacagtatcaatgccagtccgaatacataaaccgataacaactgcagtccgatgtaaataagaaacatactgactacacagaaaaagaggcttgctatccccagtccctgcatcgtgcgtgtcagattcaaccgtttcctcaaattctcgatttgtgctaccgtgatatccgtaggattttccatatagcggtcccgcaactgtcgcaccagctgcgcatacgataaaaaacgattggtataagccagcaaaatcagcgaaacagccgaaaaaagcaaagcaggagtagtgagcgtaagttcttccatcttgaaaaataggtaataggtaataaataataggtaataagtaataggtaataagtaataagtcatgcgggtaaagctaccggcagctacgattattacctattacctattacttattacttatttcaaggttcctagttctttgccaaccttaataaaagcagcgatacatttgtcgaggtgtgctttctcgtgtccggcagagatttgtacacggatacgtgcctgttctttcggaacgaccggataatagaatcccgtcacataaatgccttcttcctgcatgcgtgcggcataaatctgagagagtttggcatcatacaacataacggcgcagatggcactttgtgtcggtttgatgtcaaatccggcagctgtcatttggtcacggaaatagtttacattctctaccagcttgtcatgcagcgcattgctttctttcagcatcttgaatacttcgagacttgcaccgatgatacccggagccaacgagttggagaacagataaggacggctgcgctgacgcagtaagtcgatgatctccttgcggccggtggtaaatcctcccaatgcgcctccgaaagccttgcccagtgttcccgtatagatgtctacgcgtccgtaagtcttgtacagttcgctgacaccgtggcccgtagcgccaaccacaccggcagagtgcgattcgtccaccattacgagtgcatcatatttctcggccaggtcacagatctgatccataggtgctacatttccgtccatagagaatacaccgtcggtaacaacgatacggaaacgttgtgcctgagcttcttgcaagcatctttccagatccttcatatccgcgttggcatagcgatagcgtttcgctttgcaaagacgtacgccgtcgatgatagaagcatggttcagagagtccgagatgatggcgtcttcttcgctgaaaagcggttcgaacacacctccgttggcatcgaaacaggctgcatacagaatggtgtcttctgtctggaaataatccgagatagcagcttccagttccttatgtatatcttgcgttccgcagatgaagcggacagatgacataccaaatccacggcgctccatcatttcttgagaagctttaatcagacgggggtgattggacagtcccagatagttgttggcgcagaaattcagcacttcttttccttttacagtgatggcagcttgctgcgcactttcgatcagtcgttcttctttgtaaagtccggcttccttaatttcagccagtgtctggctgaggtgttctttcattttaccgtacataatgtttgagtgattaagttaatggtgcaaaggacacgatttttcttggaataaacaatatctttttgatttaaatctgaaaaaaaagtgcttactttgcgcactatttagcttaacacttttatttaaaaggaaaaatgaaacacattttgattattggagccaccggacaaataggatccgagttgacgatggagttacgcaggcgttatggaaacacaaacgtagtagcaggttacatccagggtgcagagcccaaaggagagttaaaagagtcgggaccgtcggcagttgtcgatgtaacgaatggtgaaatgattgaatcggtggtgaaggaataccacattgataccatatataatttggctgcactgctatcggtggtggctgagtccaagccgaagctagcctggaaaattggtattgacggactgtggaatgttttggaagtggcgcgtgagcagggatgtgcggtatttacccccagttctatcggatcgttcggtgcaagcacgcctcatacacagacaccacaggatactatccagcgtccccgtactatgtatggagtcaccaaggtaacgacagagttgctgagtgactactattttaacaaatacggtgttgacacacgtgctgtccgtttcccgggcatcatttcgaacgtgacccctccgggaggaggaaccaccgattatgctgtcgatatttattattcggcagtaagaggagaaaaatttgtgtgccctatcaaagaaggcactttaatggatatgatgtatatgccggacgcgctgaacgcagcaatcatgctaatggaagcagatccgaccaagctgatacaccgcaacgctttcaatatcgcctctatgagtttcgaccctgagacgattttccatgccatcaagaagcatgtgcccgcgttcgagatgatctatgatgtagatcctttgaagcagcgcatagcggacagctggcccgatagtctggatgacacttgcgcccgcgaggagtggggatggaagccggcttacgatctggaaagcatgacggtggatatgcttgaaaagctaagagagaaactgaaaaaatgaaaaaactaattgcgggggttctggtgcttactatccttggttcctgtggaaacaagaaaacgaacatcgacccctttgcatctatcactcaagaggtggattctatccggcacaaagccgattcgatccatcaggaggaattgccggaagagcccaaaccgacagaagcggacgaatctttcgacgattttatctataattttgcttccgatgatgccttgcagcgtcagcgtgtcaagtttccgttgccctattacaagggagatgagaaaaccaatatcgaagaacgcaactggaagcatgatgacttatttaccaaacagcattattatacgctcctgtttgataaagaagaagacatggatttggtgggggacacctcactgacctccgttcaggtggaatggatattcgtgaaaacccgaatggtgaaaaagtattattttgagcgtatcaaaggggcatggatactggaggctatcaatctgcgccctgttgagcggaatgaaaatgaagactttgtggagtttttcagtcattttgctgccgacagcctttttcaaagccggcgtgtgcaggagcctctggcttttgtcacctcagatccggacgatgacttctctattctggagacctctcttgatttgaaccagtggtttgctttcaagccggcattgcctacagaccgcctttcgaatatcaattacggacagcggaatgatgataactcgccgacaaagattctcgccttgaagggaatcggaaacggcttctctaatattctatatttcaggcggaaagcaggcgaatggcaactgtataagtttgaagataccagtatttagcaacgaaaaaacggaagatatgtattctcttttatcacacaatacgttcggcattgatgtctatgccgaacggtttcaggaatatgcttcggtagaagaactgaagacattgatagctcaaggtgcccttacgacaccttttttgcatataggcggtggaagcaacctgctttttgtcaaagactatgaagggctggtcttacattcccgcatcgaagggatcgaggtgacggaagaggacgaacggagtgtagccgtacgggtaggagcaggcgtggtttgggatgactttgtaggctattgcgtagagcatggctggtatggaacggaaaatctctcccttattcccggtgaagtgggagcgagtgccgtgcagaatatcggtgcctatggcgtggaagtgaaagacctgatcacctctgtcgaaacagtgaacattcacggtgaggagcgtgtttatgctgtagatgaatgtggttatgcctatcgcgacagcattttcaaacgtccggagaataaatccgtatttgtgacctatgtctgtttccggctcagcaaggaagaacattatacattagattacggcaccatccgtcaggaactcgaaaagtatcccgaactgaccttgccgatactccggaaagtgattatcgatatccgtgaaagcaaattgcccgacccgaaagtgatgggaaatgccggcagtttctttatgaatcccatcgttccgcgcgaaaaactggaagccttgcagcaggaatttcctcgaatccccttctacgaactgaatgacggacgagtgaagattccggcaggatggatgattgatcagtgcggctggaaaggaaaagcattaggtccggcggcagtgcatgacaaacaggccttggtgctcgtcaatcggggcggagcgaaaggtagtgacatccttgcactttcggatgcggtgcgggcttctgttcgtgcgaaattcggcatagacattcatccggaagtaaatttggttggaaaatgaaagtaagaatacttggaagcggaacatcgacgggagttcctcagattggatgtacctgtccggtctgcacttctgccgatccgaaagataatcgtctgcgtgcgtctgcgatcgttgagacggaagatgcgcggatacttatagactgcgggcccgattttcgggcgcaggtgttacaccttccttttgagaagatagacggtgtgctcattacgcacgaacattatgaccacgtgggcgggctggatgatttgcgtccgttttgccgcttcggggcggttcctatctatgccgaagaatatgtggcacgcgcattgcgtttgcggatgccttattgttttgtcgatcaccgttatcccggtgttcctgatattcccttgcaggaaattgaggtcgggcacgccttttccatccaccatacggaagtggtgcctttgcgggtgatgcacggtcggctgccgattctgggctaccgtatcggcaggttggggtatatcacggatatgctgaccatgcccgaagaatcgtatgaacaattggaagggatagatgttctgattatgaatgcgcttcgtatcgctcctcatcctactcaccagaatctggaggaggcattgaaggtggcagaacgtattcgggcaaaggagacatacttcatccacatgagtcatgatatggggctgcacaagaaggtagagaaggagcttcctgaaaatattcaccttacatatgacggaatggaaatcattttctgattattggtgatttttttagcaaaagttttgttttctttgtagaaattattatttttgcccctagccgataaacagcaaatattatgaaacttcgtacgatagtgaaaatagcgatcacttcttctgttgtacttttgtgctcaggttttgcgttgtactctttttttaggttgtcggctgccgaagatcagaaagatttcgatctctataccttggttccatcctctgtttcagcagtgtttgcgacggaagatgtagccgaatttgtaatggaagtggatgagctgacctgtagtcgggatcaccagtatctttatgtttccaaactcttttcttatctgaaacaatatctttattctcttctcgaagatgctcctcacggtctgagcaggcaaatgaatcagatgctgatcagtttccatgagccggacaatgatcgtaatcaggtgctttactgccggttggggaatggagaccgtgcgctgatcgaccgttttgtgcagaaatacgtttcgtcgggctatcctccgaaaacattcgattataagggtgaagatatcattatctatccgatggcggacggtgattttctcgcctgctatctgacggaagactttctggtgctcagttgtcagaaaaagctgatagaggaggtgatagatatccgcaaaaccggcaagtcgctggctgccgactctgcttttaaagaagtgcgggcgccgaagaaaagtccgactgttgctaccgtctacactcgtctggcaggaatgatgggatggacggagtttgatatgaagctgaaggatgatttcatttatttctccggagtcagccattatgtagatacttgttttaactttataaatgtaatccgccagcaggaatctgtcaaaggatttccgggcgaaacactgccctccactgctttttatttcagtaaacagggcattacggactgggcatccctgctttcctatggcgatacgcaggaatatgcgacggcaggcagaacgagtgaagtgttgaatcgggatcgggaattgtcgcgttatctggcagagaatacggggcaggatttggtggcttgtcttttccagcgggaagactctctgatggggcctgcggctgttttaagtctctcggtgatggatgtggctgaggcggaaaggatgttgcgctctttggtaaatacggctccggcagaggaaggaacaggccggaattcacgtataactttttgttatactccctctaaagcataccctgtgtacaggttgcctcaaacaacgttgtttacgcaactaaccagttttgtagagccgtccttgcatgttttcgctacattttatggtgggcgtttgctgcttgctcccgatgaagatagtttgtcacgatatatccgccagctggataatggcgaagtgcttgacggcgctttggcttatcgggcggggacggacggattgtccgattcgtatcatttcatgttgatggcggactttgggcacgtgctcgaacagtccggacatcaggttcattatgtgccggaattctttctccgcaactccgaatttttccgtaatttcattctttttgcgcagtttacttgtgcggacggggtggtttatcccaacattgttttgaagtataaatccgaatagaattcgaagaaaaaaactggcgaaaatagaggggaaaaatagctcttaatttgcgaaactaaaagctctgaaacgccttctggcagggcgcgaaaaccgaatggaaaccagtagagtagagaagagtatataattctattctaaagaaatagaattaataagaaaaaagatagagaattttgccgccgctgattcactttttattccattccgtaagatacctttaagagaattcatgaaggggtgtcaaaagaactaaagtgggggtgactaaaaagtcgattctatctctattctcctccttcctgaaggaggagagtttagttactattgacttttggcataccttcatgggggcttttccgtctcgctgtccaatctccttcgtctcgctgctcaatctccttcagctcgctgctcaattcctttcgcctcgctgctcagtccttttcagctcgctgctgaatctgcgttggtcccgaggtgaattcacttcagcccggtgtctggttactgcaggggacagtcataaaaaaactcccgacagaaatagttccatcgggagttttttatgcagattgtttttaattcttagaacggcaggtcgtcttttgcgtcacccatagtgaaatccggagtagcagacggagccgggggaggaacgggggcacccggagccataggagcacctgcgcctacacgttcaactttccatgcacggatactgttgaaccagcggtcgttccattgacgggcgtcaacgtcgaatgatacggtcagttcttcgcccatctgaatgttgaactgttcgattttgtcggcgccaaatacgtcgaaacacattttgcgcggatattggtcatggttttcgattacgaactcttgtgatttccactcgttgccgctagtctttgagactccacctctcggagggaggatagcgatgatttttcctgtaaattccattgcgataattttaaattctgcggcgaagttacaattttttaggaatatccctcacacaatgcttgttttttctttcgttttcttgggcagcacgaatcttttttcgtaactttgtgcgatatataattcaaaacttaaatactcgaaaatatatgaaatttatcgtttcaagtactgctctttccagccatttacaggctatcagtcgtgtaattaactcaaagaatgcgctgcctattctcgattgttttctcttcgaattggaagacggaacattgtctgtgactgtttctgacagtgaaacgaccatggtgacaaccgttgaggtaaatgaaagcgatacaaacgggcgttttgccgtagtagcgaaaacattgcttgatgcactgaaagaaattccggaacaaccgttgacattctacgtcaacacggacaattatgaaatcaccgtgcagtatcagaacggaaaatatagtctgatgggacagaatgctgacgaatttccgcagtcggctgtgctgggcgaaaatgcagtccgcgtggagatggaagcaggtgtactgctgggtggcatcaaccgttcggtattcgcaactgccgacgacgaactccgtccggtaatgaacggtatatatttcgatattacaacagaagacatcacgatggtggcatcggacggtcataagctggtacgttgcaaaacgctggctgccaaaggaaacgaacgtgccgcgttcatccttccgaagaagcccgctacattgctgaaaaacctgcttccgaaagaacagggaacagtaaccatcgaatttgacgaacgcaacgctgtgtttatgctggaaagctaccgcatggtctgccgtctgatcgaaggacgctatccgaactacaactcggtaattccgcagaacaaccctcataaagtgactgtagaccgtcagcaactgatcggagctttgcgccgcgtgtctatcttttcttcacaggcaagcagtttgatcaagctgcgtatgcaggagaatcagattgtgatttccgcacaggacatcgatttctccacttctgccgaagaaacacaagtttgccaatattcgggtgccgctatgagcatcggattcaaatctactttcctcatcgatatcctgaacaatatttcggccgatgaagtggtaatcgaacttgccgatccgtcgcgtgccggagtcattgtgccggtagaacaggaagaaaatgaagacttgctgatgctgctgatgccgatgatgctgaacgattagttatttaatggaaaattgaaaatggataatggataatgagctgcgctgtcagtgttcaggagttatccattttttatgtttcctatccattatcaattctccataatccattatccattaaagaaagaaatgaaattaaatttgaaaaacccgattgtgttcttcgatctggagacaacgggaaccaatatcaacacagaccggatcgttgaaatttgctatctgaaagtatatcctaacgggaatgaggaaacgaaaacaatgcgtatcaatcccgaaatgcatattcctgaagcttcttctgccgtacatggcatttatgatgccgatgtagcggactgtccgactttcaaggaggtggcaaagaatgtggcccgtgacattgaaggctgcgatttggcaggattcaactctaatcgcttcgatattccggtattggcagaggaatttcttcgtgccggtgtagatatcgatatgacgaagcgcaagtttgtcgatgtacaggtgattttccacaagatggagcaacgtaccctttcggctgcctataagttctattgcgaaaagagtctggaagacgcccatacggccgaggccgatacacgtgccacttatgaggtgctgaaagcacagctcgaccgctatccggatcttcagaacgacatcgccttcctggcagaatattcaagtttcactaagaatgtggactttgccggacggatggtgtatgacgacaatggtgtggaagtatttaatttcggaaaatataaaggaatgtctgtagccgaggtgctgaagaaagaccccggatactacagctggattttaaacagtgatttcacgttgaataccaaggcggtgctgactaaaatccgtctgcgtgaaatgagtaatttgattacaaaataatgctaaaaggaaaaaagataattcttggaataaccggtagcatcgctgcttataaggcttgttacattatccgcggactgataaagcagggagcggaagtgcaggtggtcattactccggcgggaaaagaatttattactcccatcactctttcggctttgaccagtaagccggtcatcagcgagttttttgcccaacgagacggtacgtggaacagccatgtggacttgggtctgtgggcggatgccatgctgatcgcacccgctaccgcctccaccatcggaaagatggcgaacgggatagcagacaatatgctgataaccacttatctttcggccaaagctccggtattcattgcaccggctatggacctcgatatgtatgcacatccttctacacagaagaatctggatatattgcgttcctacggcaaccgcatcattgagcccgcaacgggtgaacttgccagccatctggtcggcaaagggcgtatggaagaaccggaaaatattatccgtgtgctggacgagtttttctctgcgagtaccgaacttcagggaaggaaaattatgataactgccggaccgacttacgaaaagatcgatccggtccgttttatcggcaattattcttccggtaagatgggatttgctttggcggaagaatgtgcccgtcgtggggcagaggtgacgttgatcgccggaccggtgcaactgaaaacgcagcattcgcgtatccaccggatagacgtggaatctgctcaggaaatgtatgaggcagcgcaaacctgtttcccgacttccgatgtggggattctttgtgcggcagtcgctgatttccgtccggaaacggtggccggcaaaaagatcaaacgggagaaggaagaagaactgaccttgcatcttcaggctacgcaggacattgctgcaagtctgggaaagatcaaagaagacaatcaactgttagtgggctttgccctcgaaacaaataacgaacagcagaatgccgaaggaaagctcgaacgtaaaaactttgactttatcgtcctcaattctctgaatgacgcgggagccggcttccgtcacgatacaaacaagattagcattattgatcgcaaaggtcgcgaggattatcctttgaagcccaaacaggaagtagcgcaagatatcatcgaccatctggttgctgtcttgactcactgatctttattttttaggtttaatttttaatttacagaaggtgttacgttcactttatattcagaattacgcattgatagaaaaactggatatcggttttgaaacaggcttctcagtcatcacgggtgagacaggggccggaaaatcgattattctgggagccatcggtctgctgctcggacagcgtgccgatgtgaaagcgattcgtcgtggagcttctaaatgtattatcgaagcacgttttgatatctcggcttacggtatgcgcccgttttttgaagagaacgaactggaatacgatgacgaggaatgtatcctgcggcgcgaagtgcaggcgtccggcaaaagtcgcgcattcattaatgatacgcctgcttcactggcacaggtgaaggaattgggcgaacaactgatcgatgtacattcgcagcatcagaatcttttgctcaataaagaaggtttccagctgaatgtactcgatattctggctcataacgatgatgcgctggagaagtaccattcactgtataatgaatggaagctgctcgaccgtgaattgtccgagctgacggcacttgccgagcaaagccggacggatgaggactatcttcgtttccagttggaacaactggaggaggctcatctcgtggaaggggagcagagcgaactggagcaggaggcggaaactctgagtcatgctgaagagatcaaagcgggactttaccgcatcgaacagtcttttttctcggacgaaggcggactgctttctttcctgaaagataatctgaatacgctgaataatctgaaaaaggtgtatcagcctgccggagaactgagcgaccgcatggaaagtgcctacatcgaactgaaagatatttcgcaggaagtctcagcgcagggagaatccatcgagtttaatcctacccgtctggacgaagtgaacgatcgtctgaatctgatttactccctgcaacagaagcatcgggtacagacacttgaagaattgatggccttggcagaccaatatcgcagtaagctgtccgagatcacctcttatgatgatcgcatagccgaactgactgcccgcaaggaagcccagtatgaacgggtgaagaagcaagctgccgtgctgacaaaagcccgtgcggccgctgcctgtgaagtggagaaacaactggctgaacggctggtcccgctgggtatgcccaacgtccgcttccaagtggaaaaggggttgaagaaagaaccgggcatacagggggaggatactgtcaacttcctgttctccgccaacaagaacggaacgttgcaaagcatatcttccgttgcttccggaggtgaaatcgcgcgtgtgatgctttctatcaaagcgatgatcgccggtgcggtaaaactgcctacaattgtatttgatgagatcgataccggagtttccggtgaaatagccgaccgtatggcggatatgatgcaggaaatgggtgactgtaaccgtcaggtgatcagtatcacacatctgcctcagatcgcagctcgcgggcgcgctcattataaagtatataagaaggacagcgatacggaaacgaacagccatatccgccgtctcaccgatgaagaacgggtagaggagatcgctcacatgctgagcggagccacattgaccgaggctgccctcagcaatgcgaaggccctgttggcccgtacttcataatccataattcaaaatttataattcaaaattacaatgaccgataaaagtgaaatgattttcggcgtccgtgccgtcatagaggccattcaggctggaaaagagattgataagatcctcgttaagaaagacattcaaagtgatctttccaaagagcttttcgcagcattgaaaggattgctgattcctgttcagcgtgtgccggtggaacgtatcaaccgcatcacacggaagaatcatcagggtgtggttgccttcatttcctctgtgacctatcagaagacggaagacctcgttcctttcttattcgagcaaggcaagaatccgttttttgtgatgctggatggcataacggatgtgcgtaacttcggtgcgatagcccgtacctgtgaatgtgccgcggtggatgcggtgattattcctgcgcgtggcagcgtatcggtgaatgccgatgccatgaagacttccgcaggtgcgttgcatacattgcctgtctgccgcgaacagaatctgcgtgcgactttgcagtatcttaaggacagcggtttccgtatcgttgctgctaccgagaaaggagattatgactatacgaaagccgattatacgggaccgatgtgtatcatcatgggagcggaggacaccggtgtatcatatgatcatctggctctctgtgacgaatgggtgaagataccgatgctgggaaccatcgaatctctgaatgtttccgtagctgccggtattttgatttatgaagctgtgaaacaaagaaacaacgactgatatgaagaaacttttaatcttacctttagcgcttttcctcttggtacagagcggtctggcgcaaaccccgaaatgggtggagaaggcgaaacgtgctgttttctcagtaataacttatgataagaatgacaagatgctgaataccggaaacggatttttcgtatccgaagacggactggctctttctgactacagtcttttcaaaggggctgagcgtgcggtgattgtcacagccgaaggcaagcaaatgccggtcagcctgattttgggagcagatgatatgtacgatgtgatcaagtttcgtgtggccattaccgagaagaaagtgccgtcactggtagtggcgactactgctccggctgcaggcgctgacgcatggatgcttccttattctacgcagaagagcattgcctgtgtttcgggtaaagtgaaggatgtatcgaaaattgccggagaataccattactataccttgagtatgcagatgaaagacaagatggtgagttgcccggtgatgaatgcggaaggccaggtgttcggtatttcacagaagtcctccggtgcggatacggtaacgacttgttatgcggcaggggcagcttttgcaatgtcgcagaagattagtgctctgtctttgggagacgttgctctgaagaatatcggtatccggaaaggattgcccgaagcggaggatcaggcattggtgtatctgtttatggcttccacacagatgtcagctgatgaatatgagaaattgctggacgatttcattcgccagttccccaacagtaccgatggatatatccgtcgtgccaactattacgtagcaaaaggtaaggatgaccagtcttattttgacaaggctgtagccgactttaatcaagccttgaaggtggcggctaaaaaggatgatgtgtattataatatcgccaagctgatatacggttatcaactttcaaaaccggaaactacttataaagactggacgtatgatacggctttgaagaatctccgtcaggcgatggctatcgatcctttgcccgtttatacgcagttggaaggagatatactttttgcacagcaggactatgcaggtgctttggccgcttatgagaaggtgaatgccagcaatctggcttcagcagcctcattctttagtgccgccaagacgaaagaattgctgaaggcagatgccaaagaagtgttggcattgatggacagttgcattgctcgttgtccgcagcctgtcacggcaaattttgccccttatctgctggaacgtgcacagatgtatatgaataacgatcaggcaagaaatgcaatgctcgattatgatgcttattataaggctgtgaacggacaggtcaatgatcttttctattattatcgtgagcaggctgcgctgaaagcccgtcaatatcagcgtgcattggatgatatcgtgaaagcggttgaattgagccccaaagatctgacttatcgggcagaacatgcagtggttaatctgcgtgtaggacgctacgaagaatccatgaagatactgaatgaaattctgaaagacgagccgaaatatggggaagcataccggttgttgggcctttgtcagatacagttgaagaagacggacgaagcttgcggaaacttcaataaagcgaaagagctgggtgatccgaatgtggatgaacttataaagaaatattgtaaataagcggaggtgcttggaaagaataacgtcttactttcttttcggactccttagtagtaaaaataaacccctgccggcttctacagtcggcaggggttctcgtttttggggacgtttgtaaaatactctctctctctaatttctccccacttgtcaagttcaggttttaggtcttaatatgatatataggtttgattctttttttctcccgtttataagttaaatgcagcagtttatagaatactgcatcctttctttattttttttctcagaatagttatttttttctttttatggtaaaatcttctgatagaggtggagtttttaattcttttttgggggctgggtaatgaaaatgtcgaatatttcattgttcgtaaatggtataataaataggtgtggaaaatgaaataaatagatacttacctctaattatggtcgtttaacgaaaatattattgttttttatttgcgtatattggtaaatatggtcatctttgcaccgttattcgtttctgtttgttaaagaataacgaataagtgtggggtaaatagatgatttttagtaaaaaagacattcaagaagttctgccggcagatgtgactggcaggagcgtagcgcaccctaaacgttggttggtggctttagtacgtatttctcatgagaagaaaacgagtgagcgactatctaaaatgggtattgaaaacttccttcctgttcagcaagaagtgcatcaatggagtgatcgtcgaaaggtagtcgagcgtgttcttcttccgatgatgatatttgtgcatgtcgatatgtatgaacagaaagaagttttgacattgggctctatcagccgatatatggtattgcgtggagaaagtactcctgctgtcattccggatgaacagatgcaccgctttaaatttatgctagactattcggacgaggcgattaatatgagtacgactcccttgtcacctggaaccaagattaaggttatcaaagggccattatccggacttcaaggagaattggttacagtaaatggaaaatcgaaagtagcagtccggctaactatgttgggatgtgcttttgtagatataccagtagggtgtgtagagcctctggagaaataagggtttaaatataagtgaaacaagcattaagtgaataaaaggggtatggtgagttttttactacaagaaaatattgatgaactgcaacatctggcagatcatttacttcacatcggtgataaaaatgggtatgtatacgccgataacctttctgcattacaacaatccatccacgaaaagataaatgatttatattcacaacgggggaagacaccggaacaggatgctaccctgtgtttggccatccttcagggatataatgtgtcgatgtatgccaatccggaagacgaggatagaaaacggtctgtcttgcagcgttctctgaccctccttgatgttcttcccccttctcttcttaaacaacagttgtctgcggtctgtcacggtatgcaggaactgtgtgaaaccaactaacttttttatttgtcaatgaaaatacaacgactttttagcattctacttttttgttctatgctgggaagtggctcgcttatggcccagtccatgagtgactcacaggtactggaatatgtaaaggacggtatccggcaaggcaaggaacagaaacagcttgcttccgagcttgcgcgtaaaggtgtgaccaaggaacaggctatgcgtgtgaagcagctctatgagcagcagaacaatgtaaacacctcccaatccacgggtacggatatcaacgagtcccgccttcgtgaagagactaaggagaatacttccgacatgctggaagatcatccgactacggaagatttggcccgtgaggaccaggttttcgggcgcaatatcttcaatacccgcaacctgacgttcgagccgagtgtcaaccttgccactcctgccaactaccgcctgggtcccggtgatgaagtcatcatcgatatctggggtgccagccagaacacgatccgccagcagatctctcctgaaggtaccatcaatattcagaagatcgggcctgtcaaccttagcggtatgaccgtctccgccgccaacgactatctgaagggcgccctgaataagatctataacggtctgaacaatactaccgaccctacttccgacatccgtctgactttgggtaatatccgtactatccagatcaacgtgatgggagaagtcgtgcagccgggtacctacgccctttcttccttctctaccgtcttccacgcgctttaccgtgcaggcggtgtgagtgatatcggcagccttcgaaacgttcagttggtacgcaacggaaagaatatcgccaccatcgacgtctacgaattcatcatgaaaggcaacacacaggatgacatccgccttcaggaaggtgacgtggttatcgtccccgcttacgatgtcttggtaaagatcagcggcaaggtaaaacgtcctatgcgtttcgaaatgaagaaagacgagaaccttgccactttaatcaaatatgccggcggctttgaagctgacgcctacacccgttcattacgtgttgtccgtcagaatggtgaggaatatgaggtcaacacggtcaaggatatggactacagcatctacacaatgtgtaacggcgacgttgtaacagccgaagccatccttaaccgcttcacaaacaaactggaaatccgtggcgctgtctatcgtcccggcatctaccagctcagcggtaaactgaatacggtccgcgaacttgtccatgaagcccagggtctgaccggtgacgctttcctgaatcgtgccgtcctttatcgccagcgtgaggacctgaccagtgaagttgttcagatagacatcaagtctatcatggacggtacttccccgaacctcgccctgatgaagaatgacatcctttacattccgagcattcacgatctggaagatcgtggcaatgtcacagttcacggtgaagtcgcgcaccctgattcctatccctacgctgataacatgacacttgaggatctgatcatccaggccggtggcttgaaagaagccgcctctactgtccgcattgatgtgtcgagacgaatcaagaatccccgtagtaccgcggataatgatactatcggtcagatgtataccttctctttaaaggatggttttgtcatcgacggtcagcccggttttatccttcagccttatgacgaagtttatgtccgtcgcagtccgggttatcaggcgcaacagaatgtagtcattgatggtgaaattctgtttggaggaaattatgccatgaccaaccgtgaggaacgtctttcggatctggtgaataaagcgggtggtcctactaaccttgcttatcttcgtggtgcaaagctgacccgtgtggcaagtgcgggtgagaagaaacgtatgggtgatgtgattcgcctgatgagcaggcaattgggagaggccatgattgactctttgggtattggtgttgaggatacctttacggtaggcattgatctggagaaggctttgactaatcctaagggtagtgccgaccttgtcctacgtgaaggtgatgtggtctttatacctaagaatactaatactgtaactatcaatggtgctgtcatggttccgaatacggtttcttatatgaagggaaagaatgtggattattacctgaatcaggccggtggctattctgataacgcaaagaagagtaagaagttcattgtttacatgaatggtcaggtgacgaaggttaagggtagtggtaagaaacagattgaaccgggatgtgagattattgtgcctagtaaggctaagaagaaagggaacatagctaatattttaggttatgctacttccttcagttctttgggaatgatgattgcttctattgctaatctgataaagaaataagattatgtctgaacaacatgtgagtaagaaccaatctacagatttagatacttcttcgaaagatgaaattgatttagtggaaatcttgtgtaaaattatagtaattcgtaaaaaaatatataaagttgctgggataggactgattattggcgttattgtagcattgagtatccccaaacagtatacggtaaaagtgactctttctccagagatggggagttctaagggaactaatggattagctggacttgctgcttcttttttaggtagtggagctacaacaggagatggctctgatgctctaaatgcgtcactttcttctgatatagtctcttctactccttttcttttagagttattagatataactgtctcttcttcgaataaaagtaaagatataactttagcatcatatttggatgaacagacttccccttggtggagttatgtgatagggttacctggtattatcatcaatagtattaagtcattgtttgaagatgacaacaatatagatattgataataaagtaaagagaggtgctattgaactaacaaaggaagaaagtgaaaagattgctacacttaaaaggagtataactgctttggttgatcaaaaaactgcaataaccaatatctctgttactttacaagatcctaaaataactgctgttgttgcagattctgtagtgtgtaaattgcaagaatatattatcaattatcgtacttctaaagctaaggaagattgtagctatttagaaaaactttgtaaagagcgccaacaggagtattatgtagcacaaaaaaaatatgcactatatatagacactcatgatgatataattcttcaaagtgtaagagcagaacaggaacgtttacaaaatgatatgaatttggcttatcaagtatatagtcaagttgctagtcaactgcaagttgctagggcaaaagtacaagaggaaaaacctgtttttgcagtgttagagcctgctgttgtgccacagtatccttcagggatgggattaaagatatatgtattactatttatgtttttggctatcgtaggcacgattagttggatatttataggtgacgatttatggaatcgtttaaaaggaataagataaaaatagttttgtataatgctttgttatattcaccttaaccaattatgaatttaatatttattattatatcttttgttatttctgtaggtgtttcccgacttattatacctcgtattttgatgatttcattacataagaaattatttgatgtaccaaatgaacgaaaaatacataagcatgccattcctcgactaggtggtgtcgctttttttcctacaatattgctttcttgttgtatcgttttagcacttcgtgctttgatggggtataatatatcaatattgcaggctatatatgcattgcctgaatgtacacttctagtttgtgggatggttcttttatatctgactggtatagctgacgatttagtcggagttcgttatcaccagaaatttattattcagattttatgtgcaagtttgttccctattgctggtctttggataaatgatctttatggattattcggtatttatgctcttccatcctatgttggtataccttttacaatatttacggtagtatttattactaatgcaattaatttaattgacggtattgatggtcttgcttcgggattgagcagtgttgcattattggtttttggtttcctatatattagtaagggcttatggttgtatagtatgtttgcctttagtacgtttggggtcctagttccatttttctattataatgtttttggaagcgcagagcgcgatcgtaaaatattcatgggtgatacagggagtttgactttggggtatatcttgagttttttagcaatcaaatatagtcagaataatgtagatgttatttcgtatactgaaggtgcatttgtgatagcttttagtactttgatcgtacctgtatttgatgtggtccgtgttatattagttcgttttcgtaatggtaaaaatccatttgagccagataaaaatcatattcatcataagtttttggcaatgggattcactccacggaaatcgatggtaattatattattgatttcttgtacttttagtggactaaatatattattaatgccctatgtgaataatacactcatgttgatagcagatatcttgatatggattagcttgaatttatggtgggataaaataaagatgaataagctgatttaaatattgacatatataggattaaaggaaaacttttaaaaatcatatttagtaatgaaagcatgttttatggggttaggctatattggtcttcctacttcgattattgccgcaaaaaatggtattcaaattctaggagttgatataaatccaaaagtagttgaaaaaactaatgcaggagaacttcatataattgaaccaggtatggaagaaatattgaaagaagtagttatgtctggtatgtttcgagcttcaactatacctgaagtttgtgatgcttattttatggtagtgccgacaccttttaaaggtaatcatgaaccggatatttcttatgttgaagcagctacgcgttccgtaattccgtatttaaaggaaggggatctttatgtgatagaatcaacttcaccagttggaaccacagagttaatggcgagtattatttatgcagagcgcccagaacttgaaggacaaatttatatagcatattgtcccgagcgtgtattacctggaaatgtaatatatgaattgatacataatgaccgtgttattggtggattaaatccagagtcaacagagaaggctattaatttttattctcagtttgttagaggtgtgttacataaaactaatgctcgaactgcggaaatgtgtaaacttacagaaaactcttctcgtgatgttcagattgcctttgcaaatgaattatcaatgatttgtgataaagcgaatataaatgtgtgggagttgattaatttggcaaataaacatcctcgtgttaatatattgcagccagggtgtggagtaggtggtcactgtattgcagttgatccttattttataacagccgagtttcctgctgaatctcagttgataggaaaagcaagagaaatcaataattacaaatctttctggtgtgctgagaaagtaaaaaacgcaatgcttgaatatgaattgaagaatcatcgtaagcctattgttgccatgatgggactagcatttaagcctaatattgatgatttgcgtgagtcgccagcaaagtatgtcacgacaaaagtaatgcaaaattgtaataatgccactatatttgtagttgagcctaatgtgaaagaacataacgtatttaagttgactgattatgaggaggcttatgataaagctgatattgttgtgtttatggttgcacatgatcttttcacgagtcttccttatcgaaaggataaagttattcttgatttttgtgggatatacaaataatagatagatattgcatacatccgttggtaaaaacaagcgcatagcaaaaaataccctaatgttatatatgcgtatgctgcttattatggcagttacgttatatacttcgcgcatcattctgaatactcttggtgtagaggactttggtatttataatgttgtgggtggtgtgatttctatgttaggatttttaaattcttcattagggggagccagttcacgctttattactttttcgttaggaaaaaacgataagaaggaattaaggaaagtcttctctacggttgtttttatacatcttattcttgctgttgttatcattctattgggagagacgctaggattatggtttgtttatcataaactagttatacctcctgaacgtctgacagcagccttgtgggtatatcattgttccattctgactgcagttgtgtctataataagtgtaccttataattcattagttgtagcccacgagcgaatgagtgcatttgcttatatttctgtaattgaggtagctttaaaattaggcattgtttattttttggtatatatttcacaagataaattgatcacttatgctgtgttatatctgatcgtgcaaatatttatccgatttttatatggatgttattgttctagccatttttcagagagtaagattctgtttggttggagcccacagttagttaaagaaatttcaatttatgctggttggacagtaaatggaaacctagcagttgtaggatatacgcaaggaatcaatattcttttgaatttgttttttggtccagtagccaatgctgctcgtggtattgcagtacaagtgcaggcggcggtaatgacatttatgcagaatatgcagatggcagttagaccacaaattataaagtcctatgctacttttgatttgtcatatatgcatacattggtggtggcatcatcaaaatatggtttttttttaatgttggtgctaactttcccgattatgttgtgtgtagatcctatattgaaaatttggcttggggtagttcctggatatacggtaggatttgtgcgaatcatgttaatgataggtttgttggagtccttaaaagtagcattaattagtgctatacatgctactggcgatattcgaaaatttcaaatttatgaaggaacttttttgttaacagttgtgcctattgcttatgtcttgttgaaagtatatcatatttctccaaatgatgtgatgttagtatatttttttgtggaattagttactcaatgtattcgtgtgtggattgtttgtcctcgtattcagatgccttttactagttatttaaagaaaataatttgtccgatattacctcctttgctatgcatacttccagtcttatcttggctttctctgcctaaagaactttctttgggctgcttggctttatatttgtctttagctgtattatatgttttgatttgtatttatctattaggattaacaagttcggaacgtagaataatgtataattttgttaaaacaaatattaattgtattttgaattttttacgagtgtaaaaaatcacaataagcaatatagtaacgaattgtataaatagatgagaatgacaaatattgatgtttcgattattattgtaaattatgacatcacatctttggtagtaaatgcaatagattctttatttcataaaataaaagatcttactattgaaataattgttattagtaatgtttctaatgatatctccccccccccctccccaaaaagcaattgttagaaaaaaatggtaattttttattgttggattaaaaggaagggtcggtttgggtagagtaaataacgaaggtataaagaagattaagggaagaaatattctacttctcaattctgatatacttttacttctcaattcagtaaaaatattatctgattatttatatactcatcctaaagttggggcttgcggaaggaacctgtataatattaactaaaagctagtgtatttttatcatcgttttagatctggaattttctcagaagagttagcagtacttgtgatgggaataagtaatagatttatttatcagcctcttttacctatacctctcatcctattgctgtaggaaatgtttcgggagctagtatgatggtttctcgtaaagtattagatgaagttggaatatttgatcctgatttttttatgtattcagaataaactgaattatcttggagaataaaaaaatggatatataataaagagcgtgcttcaatcaagaattgctcatttggagggacaaagttttaaagtgcctgaaacaagaatacgaatgatgttggaaagttttatgaaatattatatcaaaacgaggggatgttttgatttgaaagtagctgatattttattatggctaggtgtggaaataaatgtaataggttggaaaatattaaaaagaagggaacgagaaatattttataagacgaaatggatattggtaaataaaatgtgttcattattttggaggttatgagaaatgatattgaaaagagaatattatctgtgattgttcctgtatataatgcagaacaatatttggatcaatgcatttccagtatattggatcaatctttttctgatttctatttgtttttagttaatgatggaagtacagataactctagagatatttgtgaaaaatttgcattgctagactcacgtgtaacagtatggcatcttcctaataatggaccaagtactgctcgaaattttgctttggagaaggtttctactgagtgggtgtgttttgttgattcagatgatattcttgaaaaggattatttgaaagtcttttttaagtacggtgttcctgataaatattgtttggagatgcaaggaatggaatatgtagattgtactggaaacaaaggattgaatcatattatatatccggaaatatatttattgggagaaaatgttaagaatggaattgttgagcatagattgttgcattcgggggggccatgtcttaaattatataatataaacgtaattcgggaaaattgtataacttttaatacagcgtttcgctttcatgaagatcatatattttatcttcaatatttatataatgtaaaaagcattcgcttgttgtctggtgctaaatataaatataggcaagtggagggatctttgactcatcgaatacatccttatgagcagattgagttagcttatcacttattttcaaataaactcgaactggttataggcaaattccaaattgaggattcatcttatttgaagcagatcaggcatgatgtagcaagaattcatgttaaagcaattcgtttttgttatctgtcaaaaccgattaaacttgaaagggtgaagtttctagaatcttgtaaagcggagaaagaaaatatgaaaaaaagatactttcccacttcgtgtaaggaatggatttggaaagctattctattgtacgttccagtttcttttcaggatttactattgtcaataataattaataaatatgaaggaaaagacagttaaaaaggtgttatttctacgaaaaaaaatatctggggagaatagcatagaggaacttgcttatattttgatttctaaaatccctgatttagagttagtcatatttccagagacgggtaactcttttagtaaaatagttaaaaatatatgttatgcacggaaacatcaaggagacataaatcactttttctctccttctgattgttatgtaattccatttttgaaaaataaaaaagttgtaacttggcatgatgttgggacaggattgatgtctcaatcagtaataaaaagatggatacgaaagaaattgttaatggcattccctttgtattttgctgatagattaacttgcatttcagaacatactaagcaagaactgaaagaattatattctggttcagaaaacagatctttggtaatttataattgttataatcccaaattagaatatacgcaacatacttttaatactcaaaaaccgataattttgcagataggtactggtatgcgtaaaaacttagctcatgttattgaagcattacaaggaattgagtgtgtgttatatattgtaggcaagctaagtaaggagcaaaagagacttctggaagaaaatgaaataaattatgtatcagaatatgatgttgatttcaaaagaataattgaattatataaactatgtgacattgttagttttccttctttttatgaaggatttggaatgcctataatagaagctaacgttactgggagggtagtattgactagtcgtatgggggctattcctgagatagcaggagatgccgtatattatgtagatcctcatgatataaatgatattcggaaaggttttttgcttctaattaaaaatgtaagttatcgaaattcattgattgaaaagggcaggataaacgctaaacgttttacagtagataaaatgataaatagttatagtgaattatatactcaacttgcgaaataagcaccaactaatgataatacatagttattatagtaaataccttctgttatctttcttgattagctttcttttatacatagggttaattttggttactgatacaataaatggggagtttgtatgttggcagatatttacaatattttcttttttttcttctttatatttagggctaaagttgaaagtaaaagaactgtttttgcttatctttagttatcaaatcatcttctcttatattttacattggtactttttatttaaaactagtagtgcttttggattcaatgcggtcgattctgttttatattcccagattgcgtttcaaataaaggatatgaattggatagaatctattagggtaatagaacgttatttttatgatttgtctgattatggttatccgttgtttttgaaatgtgtatatactttgggaggaagtttggaaaattcgataatattgttgatatttattaattgcgtgatgcaaacaattgtttgtattatgacgtatgatctttctaatatgctattgtatgatagatataaatctcaatggataactttgttatggggattaaatacggcatctgtctatttgaatgcatctggacttaaagaacctttatttttgttcttatctgtggctactatttggagtatatataaatgtaaggagagaaagaatattggatggcatatactagtatggatgttaataacttccacttggttttttcgttattatttatctttgttttttataattatatacattggatactattggtttccatatctctataatcgttattttggggtaatttgtatagtttcaattgttctatgcctttattttacgagtttgttggtgtactatttcccagcgatatattatgctttgttaaataccgaagaaacattttcgtctaatggcatattgtttaagtatgtttcgtatttgcttgcatttttaagtccaataccaaaatattttcaagtagcaacacctcaagatttgattatgcttgtttattccatagtgaaattctctttttcaatctttgtattattaggttcatatttttttattaagcataagaaaacgcaattttatcctttaataagtatcgttctgtttaatgttttactgttaattgtgtctggtcatatgattgaatataggtattcatatgttataatgccatgtttttttatattgatgatagctggaatggaatatagaaacaaatatcttactactgtatatttgtttttctcggcttttattattttattgtttaatctgcgtttgtattagtttgcatgaaaattttggttatttctaatatgtatccttctgttaaggatcctgtgtatgggacttttgtacaaacttttgtggaacaaatgaaggtgttaaacactgagggcaaaactaatataatcgttattaaagggcgtgatggggagtatggaaggaagctgtttaaatacgtaaaattttatattagtatacttttttctttactgtttcggaaacatgatattgtctatgtacatacaattacctatcctattatccctatccgtttagctttactatttcgaaaacttcccttagtctttaatgtgcatggaggggacgtattgactcatgggaaaatagcaggaaagatgaagcaatatgcacgtcctgtattacggaatgcaaggatgattgtttcaccttcctttttttttaaggagatattgttatgcgaatttcctgagctagagggggataagatatttgtatcttcttctggcggggtgggtgttgaattttataaagagaggccgaaagtgaaaaatgagattcctataataggatatatttcgcggatagataaaggaaaagggtgggatacattgatagatgctttatctatattgcgagaaaggggagtttcgtatactgctatcattgctggtcgtggtacattagaaaaagaaatgatgaaaaaaataagagatttatatcttgataatttgattaaatatataggtccaataccttatcattctcttcctgaaatatattgtactttagatttatttatctttccaacatgtttggaagaaagtctaggattagttggattagaagcaatggcttgtgaagttcctgtgatcggtagttatatcggtggattaaaagactatatcaaagataaagaaaatggattcttttttactccgggaaatgcggaagaactttctaataaaattgaattatatctatctttatctagttctgaaaagcaaaaaatgactgaagctgctaaaaggaaagcgcaacggtatgcttcagaaatagttggaagggagttgtatgctcaattattgaggttgattgattaagattttatttatcaaaaatattatttatataatttgtttactcatatattatgtaatggtttactatttgtctttttcaacaatactctttggaaaaatatcctgtaaaataagatccttttttaattattataatttactagatacgagaggtaactatagatttaaacattaaaaatgagaattaaaggacggaaataattcgggattagaatgtaattttaaaatgcaaaatgtagttctgggttagctaataatgttataataagaagaaaaatgttgataccttgggtctcattttgataaaattgatattcctatgaaattgcaagactcgtctagtaaaattaaaatataaagtggtgatggtgtttggatcggttcttgtgtaattattccatcaaagttagaaagaatagacaatggtgtgggataggtgcagggagagttacaacgaaaaacatctcaattacgctgtagctgacgatcctacaaagattgaaggcttaaaacttttgggataaaggaatagtagataataatacatataaatttattattaaaaggttataaattaagatgcataagattgttgtaaacggggtggaaattttcccttttagttcggaagcgcagttattaaattacgtaaatgagaggaaaggtattcttattgctattaatgctgagaaaatattgaatgctacaaaggaaactcgttatattattaatcggaatattggttattgtgacggtgctggtgcagtgatggctttgaaacggaaaggatataaagatgtttgtaaaataccaggttgtgaattatggattaagattattagtaaatattgcgaagaaaagagtttttacttgataggtgctaagaagcaggtaattgaagatgttgttgctaaattaaaagaagaatataagggaataaatatactaggatatcgtaatggttacctaaaaacggatgaggaaaaacaagcgttgattgaagatattgtgagagtaaagcctgacgtggtatttgttgctatgggatctcctaagcaagaattgctgatggaggatattcagaaacatcacgatgctatatttcagggattgggaggaagttttgatgtatataccggtcgcgttgaaagagcacctaaatggtgggtaaagcacaatttggaatttgcatacaggctaataaaggagcctaagagaataaaacgacaaatttaccttgtgaaatttgcctattggttaatgatgaataaaatatgaaaatgaaaaaagtaatgttggtatttggaactcgtccagaagcaataaagatggcgccattggtgaaagagtttcaaaagtatcctgagtattttaaaacagtcgtatgtgtgaccggacaacatcgggaaatgttagatcaagtactaagcttatttgaaatcataccggactatgatcttaatataatgaagcagggacaagatttgtatgatgttacagcccgtgtgttaaccggaatgagagatgtgttgaaggaagcacagcccgatgttgtttttgtacatggcgatactactacttcaacagcggcagctttggctgcattttatcagcaaataccagtagcacatgtggaagcggggcttcgtacacgtaatatctatagtccatggccagaagaaatgaatagacaattgacgggacgtattgctggttttcatttttctccgacggttttaagccgacaaaacttgattgatgaaggtatcgcagataatagaattactgtgactggtaatacggtgatagatgccttatatgtggtggttgaaaaaattaaaagagaagtggagttagatgaaacattgagagaaaagttaaaggaggtaggatatgatgtgactcgcttggaagatggtaggaaaatggtgttgataacaggacatcgacgtgagaactttggtgatggttttattaacatatgtaaggctattaaaaccttgatagataaatatcctaatgtggactttatttatcctatgcatttgaatcctaatgtacgtaagccgattcatgaagtttttggagaagatttatcatgtcttggaaatatgttctttattgaaccgttggaatatttgagttttgtctatttaatggagaagtctactattgttcttactgatagtggtggcatacaagaagaagctccggggttaggaaaaccagttttagttatgcgagagacgacagaacgtcctgaagcattggaagcggggactgtgaaacttgttggaactgattataataaaatagtaaatgaggtatcttctcttcttgtagatagtatcgcatatgaaaagatgagtaaagccgttaatccttatggagatggacaagggtgtaaaaggatagtaaatagacttattaaagaagtagtaaaagggtaatatttaatacttgtagttttaaaactaaattttcgtcatcatccgtcacttcaactattaatcagttatcaatcaatgagctaagagttacggcaaccagtgacggcaaagtgacggcagaataaatcaaaattttgccgtcacttttctttttatctagagtttagatatcctattgatagttggatgcttaccactaagagagtttactgaatgcttatatctagactatactgcgcgtattagagcaaatgctagtaatcttaatatgcagacaaggcttggccaatatgttttgtatggtatatgttctcgttccatgtacgtgaagcattcggaccacgtatgtgaacccatgggatcacgtacacgaaccgatgggaccacgtacgtggaacgaatttttgttactagaaagatacataaatctagtattgaaaactacttaatggagctatgtcttactattaagtcaaagagattatgtaaagttaatagtagaatttttattttggaataatactgctgaaatccttttctacctgatatttaatgactatctttgagactcataaccgtttataaatataaaaatagaataaggtagaaatgaagataacacagataagagaaacagaaagcgcagaagcaattagtgtattgaatttagaatcgtttgtagaaaaaataaaagtagagattaaagcgcgtccggtatccggatttcgtgaggctttgcattatgttttacccggtgaatcttgccatctttcgggtaaactgcctaaaataattccagctgttgcattcggacgtgtcaatggagtgaagcgtatgaaggcttataatggcattgtcgagttgagtgtcggtccccttgctggaaaagcagaaatagagatcgtcaagaagaaagcggcggaacttccgcaaactaaacttgcttttatgggatcgagcggaaagaccgtcaagatatggacttattttacccgaccggatgggacattaccacaaacacaagaggaggcagaaatatttcatgcccatgcgtaccggttggcggtgaaatgttatcaaccccaacttccttttgacattcagatgaaagaaccacttttggatcagtattcacggttgagctatgatccagaattgttttatcgggaagacgcagtacctttctatctttcccaacctttcggaatgcctgccgagaacagttatcgggagaagacgattgcagagaagtcgcctttaagtcgtgccgtaccgggttatgatacggaagatgcgttggctgtgctatatgaggctgctttgaggaaaacatttgaagaaatggaagatggctggaagcgggatgatgaattgcagccgttagtagtgagactggcagagaattgttttcattccggcattccggaggaagaagtagtgcgacggaccattcatcgctattacaggcaacaacaatcgctgctggtcagagaaatgataggcaatgtgtataaagagtgcaagggattcggtaagaaagacttgttgaccaaggagcagcatcttaatttgcaaacggaggaatttatgaatcgccggtatgaattccgatataacacacaggtgggagaggtagaataccgggatcgttgctcattctttttccgttttcgtcctgtagataagagaatacagaacagtattttgctggatgcccagagcgaggggatttctgtgtgggatcgggatatcgatcggtatctgcattccaatcgtatatctgtctataatccgttggaagagtttctttttcatttgcccaactgggatggaaaagaccggattggagaactggcagacagagttccctgtgaaaataaacattggatgatgctttttcatcggtggtttctcaatatggtagctcattggcgtgggtatgataaacagcatgcgaacagcacatctccgttattggtcggtgcgcagggtacccgtaaatcaactttttgtcgggatctgatgccaccggaacttcgcggatactatacagatagcatcgatttcggccgtaaacgggatgcggaaatgtatctgaaccgttttgcactaatcaatattgatgaatttgatcaggtgactctgactcaacagggatttctcaaacatattcttcagaaacctgtggtgaatcttcgtaagccttatggtaattccatacaggaacttcggcgttatgcttcgtttataggaaccagcaatcagaaggatttgctgactgatccttccggcagccgccgttttatctgtatagaagtaactgatactattgatacgacccgccctattgactacggacagttgtatgcacaggctatgtatgagatttatcatggagaacgttactggtttgatgatgaagatgaagccgttatgacggaaagtaatcaggagtttgagcagactccgccaatggtgcagttgttctatcgttactttagaggtgctgaggatcatgaggaaggagaatacctgtatttaatggatatattgaattatttgcagaagaaatcgactattcctttatcttccaataaggtcaattactttggaaggctactgcaaaaagcagggataccctcgaaacatacgaacaggggaaggctttataaggttgtaaaattataaaatacagaaagcatttgctggtactttagtgaccgaatgatactggtgacggcaaagctgcgattcggagtgacggcaaaatgccgggaagttttaccatcactttgccatcactgcttgttattactgctatgtgattgtatatcaatatattggctctaaaagtgacggatgacggcaaaaaacatgtttttttctttaaatgtatggatggggttaactcaatattgatacatacttttttgcataaaagctttctttatttaatttattttatatctttgctagcatatcaagattacaatcaactatttattcacataaacttaataaaattatgttcaaagctcctttttcttttgacggtcgtattcgtaggatcgaatatttcctgtctggtattatcggtggtatcgtttttggtgttgcctattctctcggtttagctactttgtttcttggtgcggctgccggttccgcgggtggttccctgtttggtatcttgattggtatcgtagcgggaatagcttccatatggttctctttggcgcagggcgtgaagcggttgcatgacttaaacaagtccggttggttgatactcatttgctgtgttcctatcatcggatgggtgttcagtctctatatgttgtttgccgatggtacggtaggtcctaatcagtatggtgaagatccgaagaatcgtatgccatatcagccgcagccaacttctgtaaatgtaacagtgaatgtgtcgagagaaactcctgctgaagcatctgccgaagaagaaaaaacagaaaaagccgaatagtctttaataagcagaaatatggttgcctcttgcaaaattcgttttgcgagaggcatttttttactacctttgaggattggtaaacagaaaaaagaagataaatatgaaaaaagtaatttgcagtgaaaaagcaccgggagctatcggtccttatagtcaggcgatagaagccaatggaatggtattcgtatcgggtcagttgcctatcgatgcggctaccggaaagatggcggaaggaattgaagaacaggcacgccagtcgttggagaatataaaacacatcctggaagaaacagggctgacaatgggaaacattgtaaaaacgactgtatttctccaggatatgtctttctttgccggaatgaacggcgtatatgctacgtattttgacggagcttttccggcacgttcggctgtggccgtaaaggctttgccgaaggatgcgttagtggagattgagtgtatcgcggttcgctaacaaatcggcgacaataaaactgctgcctcccacgaagatgaagtctttaggggggcagttttcttttgctgcccgtacggcatccactacggtagggtaggaggtgcctttcagtcccgcttccgaagccattttcatcagctcatcttccggcattgcacgtttcacgctcgctttggtgaaatagtaggtggcgtctttcggcaacagttccagaacactgctgatatccttgtcgctgaccatgccgaatacaatatgcaattcctgatgcaacttttcgtgtatatacttcaattgcttgcgaatacttttaaagccatcagcgttgtgacctgtgtcgcagatgaggtcaggatagctttggagtttctgccagcgtcccatcagaccggtcatctcgcatacattagagaatccggtatggtaatctttattacagatttcatatcccaggttctttaaaatatccagggctgccaggattgtgagacaattttctgtttgacagagaccgctcagttcgtagtataatcccgtcataaaactggaattatgaatggatattgcgtcttttcttttatccatgattctgtctatcgcacgtatggcgtcagccgggttgataagagagacaaattgcatcattttcattggaagcgtctgtatctgctgaagttttatttcctcctccaataattcctgcaaatcggctctggactctttcaggttatcatatgacaaatattgcacatgggtgaaactctttaattcttccgagaaggtgatgaaggtattcattgccttggctttcatcgtaaatactcttttcaccgctccggatacttttcccactactaccggaacatcttctttgataattcctgccttttctttggctattttagtcagtgtgtggcccagatattgcatatggtcgaaaccgatattggtaataacacacagatcgggggtgatgatattggtacagtccagacgtccgcccatgcctacctcgatcactgccacatctaccttctgatcggcaaaatagcggaatgccattgccgtggtaagttcgaagaaagaagggtgcagaggttcgaaaaaggaacggtggtcttctacaaagttgaccacatactcttcgggaatcatttcaccgttgatacggatacgctcgcggaaatcaatcagatgcggggaagtgaataacccgactttatagcccgcggcttgtagcacggcagcgatcgtatgcgaacaggaaccttttccatttgtcccggcgatatgtatcgttctgaattcttgatgcggatgacctaaatgttcgtccaatttgtgtgttgtctctaaacctggcttatatgctttaccacctatttgctgaaacatcggtgcactttcatataagtactttaaagtgttctgataatccatgttttataatatttaactccgggcaatctttattgctcgcaaaattgtttatctttagaaccatcattccaactgtaaacggaggattgatgaatgagactgcaaatatcaacattaaaatctaagaaatcatgggaactaagaaaaattttgtaattgacacaaatgttattcttcacgactataattgtttgaagaattttcaggaaaatgatatttatctcccccttgtcgtactggaagaactggacaagttcaagaaaggaaacgagcagattaatttcaatgcccgtgagtttgtccgggaactggatttgctgacaagtgacgaacttttctctaaaggagtgagtctgggagaaggattgggacgcctgttcattgtccccggcaatgtggatgctcccaaagttcatgaatcttttccggtgaagaaacccgatcatctgatattggcagccgttgaatatctggcgggtaaatatccgaagactccggctatcttagtgaccaaggatgtgaacctgcgtatgaaggcacgttccatcggcattaccagcgaagactatatcacagataaagtatccaatgtcgatatattcgagaaatccaatgagatctttgaaaacgtggatccggcattaatcgaccgtatctattcctccaaagaaggcatcgacctgagtgaatttgactttaaagacgtcattcatcctaacgaatgcttcgttctgaaaagtgaccggaacagtgtactggcacgatacaatccttttacccattccatttgccgcgtcacgaagggacgcaactatggtattgaacctcgtaatgccgaacagagttttgctttcgagatactgaacgatccgaacgtcaaactggtggcattgacaggaaaagcaggaacgggtaagacattgctggctttagcggcagctttaggcaagttgactgattataagcaagtattgttggcacgtccggtggtggcgttgtccaacaaggatatcggtttccttccgggagacgcacaggaaaaagttgctccatatatgcaaccgctgtttgacaacctgaatgtgatcaaacgtcagtttgccgctaactcgaccgaagtgaaacgtatcgaagatatgcagaagagcgagcaactggtgattgaagcgctggcatttatccgcggacgtagtttgagtgaaatgtactgtatcattgacgaagcgcagaacctgaccccgaatgaaataaaaacgatcattacccgtgcaggcgaaggtacgaagatggtgtttacaggagatatccagcagattgaccagccgtatctggatagtcagtctaatggtcttgtatatatgatcgaccgtatgaaagaccagaatatctttgcacatgtcaatctggtgaaaggtgaacgcagtcagttgagtgagttggccagtaatctgttataaataataaagaactaaaaaaaagaagaatgaagaattaccggtagtataaatgcgccggcggattcttcattcttcttttttattctttgtttctagtccttcattcttaattttctttcttaccgaaatattttaggaattgcgtacgttcgaacgtattgatgccttgaacgtctttaatattcagttttcctttgaactgagcgatgctttcgaaacctttccgttccatccatgcagataagaagcgggtggattctccgatgaatgcgttcgtgttctgatagacagcgctgcaaacttctacggcagtagctccggcaaggattgcttttactactgcttccggactggaaacaccaccggaggctgcataatcgattttgtctaccactgaggatgcgattccaatccaacggagaggagtggcaagatcggcggaagtgctgaatactgcaccggatatttgttccatattctcgatattgatatccggctggtagaaacggttgaagagaaccactgcagctgctccgttagcgtacagctgatcgatcagagctacaggatttgtcaggttgtcccccagtttcataatcaccggaatgcttactgtccgtttgatatgacgcaggatgtcgatatgacgctgctcaaatgaaccgtacgtatattgtacatccgattgcaatgccagaatattgatttccagtgcatcggcaccggcttcctgtatctgtttggcaaagtctatccattccgcatccgaatagcagttgatgctggctatgatggggatgttacactcttttttgctttccttgattaaggtgagatattcagctaatttgtgttcacggatatattcttccagataatcgcttgcttccggataaaaagcgggatctttcagttgatccgcttccagcatgatttgctcctcaaacagagatttcagtacgatggcacctgcacctgcttctgccagtctcttatttttgccggcactgttggtcagtcccgaactactgataatgattgggtttctgagagaaagccctgcgaaagtagtttttaaatcggtcataattatatctttttaaagtagttggctactgattaatagtttctttctccgaatatcttgcttcctacccgtaccagagtgcttcctgcggcgattgcttcgtgatagtcatgtgacatacccatcgacaattcacggaaagtatccgaatcggcaaaccagtttgcttttatttcctgaaagagcctattcagtaaacaaaattcccggttaatttgttcaacatcatcggtgttgcttgccattcccatcaatccgcagatgcgtacgtgaggcagttctttccattcgccggcatgcagcatatccttgcattcttcggggctgaaaccgaacttggtctcttcctgtgcaacgtgaatttgtaacagacagttcacgatacgtcccgctttggcagcttgcttgttgacttccgtcagcagtttgtacgtatcgattccatgtatcatcgctacgtaggggatcatgtatttgatcttgtttgtctgcaagtgcccgataaaatgccattcgatgtctttcggcaacgtttcgtatttagctgtcatttcctgcactttgctttctccgaaaatacgctgtcccgcctgataagcctcttctatcgcttcattgggatggaattttgagacagcaaccagccggactccttgtgggagttcggccagcacttgcttaagattgtcagcaatactcatggttacttatgcttttgacggatcaaactctggtttgtcattcggtccggcactgtaaggatatacatccatcaacggggtctcggataccataccgatctggtaatcggccatcgttcctttcatgccttcatccagcttcttcactgcgtcacgcaagtcggcagcctgaaccaacacttgggtagaagtttttttctctgcaccgcttttttcgtcaagggtgataaagataagtttgcacttaaaccagcggtcggcactttcctcgtcgctggggaaaagttcgctatagttggcacgtttaatgtccgatactgtaaattctcctgttataaatggagtcatctcctcgataatacgtgcttctgcttctgtaaagctgagtgcatctaccagataaggttcagtcactttcttctgcattccgttttccatcgttttctcgtaacggattttgcactcaaaccaagtatgcattgccataatttttcttcttttttagtttattgattcgtgtaaattgcctacaaagataaacaaaatacgaagtaactaccgaaagatttttattttcttttatgcagattcctcaattcgaacgaaagcatgacgcggaaaagtccgatgatgaagaaagtaaaggaaatcatgtagaccacgtacaatgcacctactgccggttgccacaatatgatgagagcacagatgatggcgaggataccgaaggccatataccagccccagtcgcgggtgccgtaacgtttgaggtcgatggaatagccggtagaggaaaagccccggaacatgagccagaaggcgatgatgaacggaatcacttccatgctgaccatcggataggcaatcaggtaaatacctaagataaggtcgataattcctcctaccagataccagccccaactcggtactcccttgcggttgctgagggagaatataatttcgagaataccgcttatcagcatcgatatgctgaaaacgatgctaagtgccacatagctgctgagaggtgagaacataagccaaagggcgacaataatatacacgattcctaacaggagagaggtccaccagttttttactgaatgtttgatctcattgaaaacagtttccatacgttctttaattttaaatgaatactctgtgaatttgtggaggaataacaaattgattttagaaaaggttttcgtgtgaacatattccggggataagttgtttttattataaagtaattttaaaatgtaaatgcaatatggcaacaacaaatttcaaaggacaaccggtgaaactgatcggtgaatttatacaagtaggtaaagtcgctcctgactttgagttagtaaaaacagatttgtcttctttctccctgaaagacctgaacggcaaaaatgtgattctaaatatttttccaagtctggataccagtgtctgtgcaacatcggtacgtaaatttaataaaatgggagcaggtctgaaagatacggtagtattggctatctccaaagaccttccttttgcccacgcacgtttctgtacgacggaaggcatcgaaaacgtaatcccattgtcagatttccgtttctctgattttgacgagagctacggactgcgtatggcagacggaccgttggcaggcttgctggcacgtgcagtagtcgtaatcggcaaagacggcaaagtagcatatacggaacttgttccggagattactcaggaacctgactatgagaaggcattggcggcagttaaagaataggtaataagtattaggtattaagtaataagtattaggtaataagtattagccgaagtcgcttatttcattattggcattaattatgcggagtattacttaatacttattacttaatacctattacctattactttacattaaaccttaaccacatggacaaaattcgatttttcttcatcgccctgttaggtatgggcgctgcacacttgtcggctcaaacggccgatagtacacaaacttctccctggacaacggaaggttttgccggactcaagctgacgcaggttagtttgaccaactggtctgccggaggtgacaattctgtcgcttttgacttgcaaggtacttatcaggctaactataaaaagggaaagcatatatggaacaaccgtcttgaactggcttatggcttgaataagacaggggaggatggcatgagaaaggccaatgataaaatatatatgaataccaactatgggtattctatcgccaaaaactggtatgcaagtgcatttaccactttccagacacaattctcgccaggatacgactattcagtcaataaggatgtcgctatctccgaatttatgtctccggcatatctgactaccggtttgggattcacatatgatccgggaaagattttcacggttgtattgtctcctgcctcttggcgcggcacctttgttctaaatgaccgtttgtctgatgaaggcgcttttggtgtcgatcccggcaaacatcttttgtcgagcttcggtgctaatctgaaaggagaggtgaaatatgaattcttaaagaacatgactgtatattcccgtctggacttgtattctgactacttgcataaacctcagaatattgatgtgaactgggaagtgcagattaatatggcaatcaacaaatggttctccactacgctgactaccaatatggtctatgacgatgatatcaaaatagttcagaaagacggcagcaaaggatcacgcctgcaattcaaagaagtactgggcgtaggagtgcagtttaatttttaagtaataggtaataagtattaggtaataagtattaagtattaaccgaagctgctgtgttatcagcttatccgcatggtttaatacttaatacttattacctaatacttattatttatttctcttcattcctttataaaccagaaagcccacgatgaatattccgattgcgatgaagcaatagccgatttcgtggctgtattctgttactttggcaatcagttgttcttcgctttcgatgccgggcactgtcgagaggtaatacccgattatggcgaggattgtattccataatccggctccgatagtggtatacaacaggaaggtgtgcattttcatgcgggcaagtcctgccggtatggaaatcagttggcgaactgccggaatcaatcggccgatgaaggtggaaagtgcgccatgcttgtcgaaataagattcggcatgttgtactttggcttcgtcgatcagacacatgtgcccgatgcggctgttggcaaatttataaataatgggacgtcccagccatttggccagataatagttgattaatgcgccgatatctgcaccgatggtggcaaataagactaccaagtaaatattaagctcgtcattgacagctgctttgtatgctgccggcgggatgatcacttccgatgggaaagggatgaaggagctttctatagtcattaataaagtgattgtccaataattcagatgttcgagacaccactggataaaagctactgattccatgtgtttttgggctaaagtttattaatatgattatttatttcctttctctttcttcatgcgcttccagacttctttgagcatttgttcgccttcctccgtttggttaggtctggacagcagatccagaatgatgtcctcgctgatcggatgggcactttcactgttgtacttgaagaagtcgtctatctcgttatgcatcagactgagaatactcagtttctctgtgacgtctgcatagttgggatcaatccggtatgactcttcaaaacagagtttggcttgatataagtactctgcgtccgaataggccgaagctaccaaataccacatttctgcactcggttccatcaccagtgctttgtcaaaagccttgactgccttttttttctgaccttccttcatgtagagtttaccttctgtcagatggataccgggatcatccggctggatctttttggcttttttacataacagatgcgcttcctcatgcttgcctagttgggaggcggctacagctttgttggtataagtatctatcaatagaggagagttgccggctccgtctgctacaaaacggtcgatgacacgttggtagcaatcgtctgcttcttgccatgctcctttgttggaatatgccatccccaaaaacatgtaacccatttcgggaggaaaggctttgtattctatcgcctttgtataattctcaatggcggcatccgaattgttcagatagaaatagcaatgtccgcggtaagcgtaggcttctccaaacgtctcgtcggcagccagtgcaaagtcacaggcttcgattgctttttcgctgtcttcagctgcaaagcggcatttggcaagtcccacccagtaactggcattgtaagggtccatatcaatcagttgattgtaataggtcgatgcggcttcgagttcattggtgcctgcgagatagtctgccatgacagctatgaaatcttcttttttaccgaatcggggggtacctttatccaaccattccttggcggcttcggggtatcccatatccatatagagatagatgatgttaataattgtttccagttcatccgtatcttctatggtatctaatgtgcttcgggctgcttccagttgtccttcgttcagcagaagttccgctttcagcatttttacatcagtaatataatcatctgtgatgctttctgcaacttttttcgccagaggtattttaccggtatcaagataaagataggcctgttctaccagtagatctgtgctgtcgggatgcaggtggaggccgtaagttatgacctcttgcgcttcgtcgaatttccgttcggcagcgtatcggtcagcaatgtcggctagttggtctccgtccagatagagttgtcggttttctgcttttgccgtttcatattgagcgattaactcgtttagttctttatttgcggacggtgaattttttctccccattctgatttattttgatttgaataaagcagcgctaaaaagatgtttaggcacggattacacagattgaagcggcttgtaagttacgtgaactctttaaatccgtgcaatccgtgtaatccgtgcctgaataatatcatagatttattccttattcggcttttggcactgcctttttatgtttaagtagcctgtgaaggctgaattttatttattgattttgccccaggtatcctttaatcctaccgtgcggttgaatacaagtttctccggagtcgagtctttgtcgatattgaaataaccgatgcgttggaattgcaggtatgagagcacaggcaaggttgccgcaaacttctcgatatagcaattcggcagaactttcaaagaatccggattgatgatttccttcattgcttccagagcttcgcagttctttgcttcacggatggcagccagttcgtcgcgtgggttttctactttccacagacggtcgtagaggcgtacttctgcttgcaggcagtggttgcagcttacccagtggagcgtacctttcactttgcggttggcatccggcataccgctgcgggtgttcgcgtcatattcacaatatacttctgtgattacgccgttctcatccttcttgcatccggtacattttacgatgtaagcgtttttgaggcgtacttcctgtcccggagtcatgcggaaatatttcttgggcgcgtcttccataaagtcttcgcgttccatccataattcacggctgaactcgatcatgtggcttcctgcttccggatcttccggattgttgatagcttccagttcctccacttgtccttccggatagttggtgatgatgagtttcactgggttgatgacagcagatacgcgggtagcacggctgttcagatcgtcacgtacggaactttccagcaatgcgatatcgttcagggcatcgtaagtcgtataaccgattttatcgataaatttatgaatagattccggagaataaccacgacggcggaagccgcagatggtcggcatacggggatcgtcccatccgttcaccaatccttcttttaccagcgtcagcaggttgcgtttgctcatcagcgtgtagctcaggttcagcttgttgaactcagtctgacggggacggttgtcgttcagatccttaccttctttcagccagtcgatgaagagatcatagagcggacggtgtaccacaaattcgagcgtacacagagagtgggttactccttcaaagaagtcactctgtccgtgggcgaagtcgtacatcggataagccttccaggtagtacctgtgcggtggtgcggatgcttcacgacacgatagatgatcgggtcgcggaagtgcatattaggattggccatgtcgattttggcacggagcaccatagcgccttcttctatctcaccgctgttcatcttcttgaagagttccaggctttcttcgattgggcggtcacggtacgggctgttcacacctgcttgcgtgggagtacctttttgctgggcaatctgttcggcagtttgctcgtcgatatatgcttttccttcctcgatgaggcggatggcgaagtcccataattgctggaaatagtcggaagcgtagtattcgtttccccattggtagccaagccattgaatatcttctttgatggcttctacgtattccacgtcctctttggtcgggtttgtgtcgtcgaaacgaaggttacatacaccgccatgtctggcagcgatgccgaaatcaaggcaaatagctttggcatgaccgatgtgaaggtatccgttcggctcgggcgggaagcgggtctgcacttttccaccatttttaccttccttcaaatccttctctactgcctgttcaataaagttcaggcttttcttatcgcctgtgtcttcgtttttaatatctgtcataacgttaaaatgttaactctatttataggctacaaaagtaggacattttttttattttactggaatataaccgctcttttttataatctcctgtccttcgggcgaaagaatgaagttgatcagaggagctacctgctctttgttcttcacattataatagtaataaagggggcggacaatgggataagttttgttcgttgcgttctccactgtcggggcggcgtagtggcttccgtcatatgaaacggaaagcgttttggtgcggggagatacgtatgccagcccgacgtacccgatggctcccttcgtctggctgacggactggatgatagcacctgtggcgggcatggaaaggctgcctgccatatagttcttgtttttcagcacgttttccttgaagaattcgtaagttcccgaagaggtttcgcgggaatagacaactattttgcggtcgtctccgcccacttgcttccagttggtgatttttccgcggaagatatcttccagctgctggcgggtgagctgtttcaccggattggaagggtgcaccactacggcaagggcgtcgtaggctacgatcacctcgtccacctcttgtccggcttctttggttttcatcttttcgctgaatttgatcggacgggaagccatggcaatatccgtcgtattatccatcagtgcggagatgccgaccccggtgcctcctccggtgacagtgacccgcgcatccggatgctgattcataaatcgctctgctgtttgttgggcaacaggcaatacggtgtcgctgcctttgatacgctgtgcgttggcgctgagagacagaagggaaagggcgattaataaatttcttctcactttcataattattctttttattgttggtgcaaataaaacaatcacatattacatttttgtttcagataagggagaaataatgtttgtaacacaaatgtaacagcattgaaatacttccttcaaacgttagtcacacctccttaataaggagttgctttctttgcatcagaaaaccaataggtatgaagaagatttttgagaaaataatagaaggaattctgacttgtagcggtttcgtaacaagtattacaatcctgctgatcgtgcttttcctgtttacggaggctttcgggctgttcaatagcaaggtgattgaagaagggtacgtgttggctttgaacaaaggcaataaggtaaatacgctgagtcctgctcagataaaggacgttttcgacgaggagataacgaactggaaagaactcggtggggaggatctccctatccgggtttttcgtttggaagacatcacggagtattatacggaggaagaactgggtccggcttacgagtatgccggcgaaagaatcacgcagttggtggagaatacgcccggtatcgtggcttttgtcccgcagaaatttatagtgcagcccgatgcagtgcattttattaaggataataccatttcggtaaaggatgtctttgcgggtgccgaatggtttccgacagcgactcctgccgccttattcggatttctgccgttgatagcgggtaccttgtgggtgagtctgttcgctatactttttgcacttccgttcgggctttcggtatctatctatatgtctgaggtcgccaatccgaaggtgcgtaactggctgaaaccaattattgagctgctgagtggtattccttcggtggtttatggttttttcggcctgatcgtcatcgttccgctgattcagaaattctttgatctgccggtaggggagagcggtttggcgggaagtatcatcctggctatcatggcgctgcctactatcataacagttaccgaagatgccatgcgcaattgtccgcgttcgatgcgggaagcaagtctggcgctgggagcttcgcagtggcagaccatatataaggtcgtgattccctattcgatctccggaatcacttccggtgtggtgttgggcatcggacgcgctatcggagagacgatggcagtattgatggtaacgggtaatgccgcagtgataccgacaacgattctcgaaccgctccgcacgattccggcaacgattgcggcggaactgggagaagctccggcaggaggaccgcactacgaagtgttgttcctgttgggtgtcgtactgttctttataacattaatcatcaactttagcgtggagtatatctcttctaaaggaataaaacgtagcaagtgatatggaaatacgaagtaataataaagcgaaacaccgttctcagaggctggctttcggaattttccggttgttgagtctctgcatagtgttgattttgtttgcgattctcggtttcattatatataagggagcgggcgctatcagttgggagttcatcacttcggcacctacggacgggatgaccggcggaggtatctggccggctattgtcggtactttctatctgatggttggcagtgcgcttttcgcttttccagtgggagtgatgagtggaatctatatgaatgaatatgctccgaaagggaagctggtacgttttatacgagtgatgacgaacaatctgagcggtattccttctatcgttttcggtctgttcggtatggcgctgtttgtcaattatatgggctttggtgacagtattctggcgggttctttgacgttaggtttactttgcgtacctttggttattcgtactacggaggaggcattgaaagcgattcccgacagtatgcgtgaaggaagcagggcattgggggctaccagattgcagacgatctggcatgtgattcttccgatggggatgccgaacatcattacaggattaatccttgctttgggacgtgtttcaggtgagacggcgccgattctgtttacctgtgccgcttacttcctgccacagttgccgacgagcattctggaccagtgtatggcgctgccgtatcacctgtatgtgatttcgaccagcggaacggatatggaagcgcagttgccgttggcttatggtacggctttggtactgattgtgattatccttctggttaatctgctggcaaatgcactgagaaaatatttcgagaaaagagtaaaaacgaattgataagtatatggatacaataaaaatagatgcgcgtgatgtaaacttctggtatggtgattttcacgctttgaaggggattagcatggagattgaagaaaagtctgtagttgcctttatcggaccgtcgggatgtggcaaatcgactttccttcgtcttttcaaccggatgaacgacttgattcccgctacccgtctggaaggtgaaatccggattgacgggtataatatttatgccaaaggggtggaagtggacgagcttcgcaagaatgtgggcatggttttccagcgccctaaccctttcccgaaaagcatattcgagaatgtcgcttacgggcttcgcgtcaatggagtgaaagataacgctttcatccgccagcgggtagaagagacgctgaaaggggctgcgctttgggatgaggtgaaagataaactgaaagagtctgcctatgctttatccggcggacagcagcagcgtctttgcattgcccgtgccatggcggtatctccttcggtgctgttgatggatgaaccggcttccgcgctcgatcctatttctacggccaaagtagaggaactgattcatgaactgaagaaggactatacaatcgtgatcgtaactcacaatatgcagcaggcggcacgtgtcagtgacaagacggctttcttctacttgggagagatggtagagtatggtgatacgaaaaggatattcaccaaccctgagaaagaggctacccagaattatatcacaggacgtttcggctaagcgccaccggagtgtttgtgaaaaacgagaatattaatcatttatatataaatagactatggtaaagtttatagaatcggaactcattctattgaagaaagaagtggatgaaatgtggacactggtgtacaatcagcttgaccgtgcaggggaagcagtcatgacacttgacaaggaactggcacaacaggtaatggttcgcgaacgtcgggtgaatgcctttgaactgaagatcgacagtgatatagaggatatcattgcattgtataatccggtggcgattgatctccgatttgtgctggcaatgctgaaaatcaatacaaatctggaacgtctgggagactttgcagaagggatagcccgtttcgttattcgctgtaaagaaccggtgctggacgccgatctgctgactcgtctgcgtttgggagagatgcaggcagaggtattgtccatgctggaactggcaaaacgtgccttgaacgaagagaacattgaaatggcaacggcggtattcggcaaagataacctgctggatgatatcaatgcggaagccacaggcatcctggcagattatatccgtgaacatccggagacggcgcatacatgtgttgacttggttggtgtgttccgcaaactggagcgttcgggcgaccatattactaatatagccgaagaaatagtcttctttattgatgcgaaagtcttaaaacatagcggaaaagtggacgaaaactacccgaaatcgtaattttttgcatgtttttaaacaaaaattagggctacttagaaaataatcctatatttgtcccttgtaacggacaagttatgggcggttttgcgtcaaatgataataaatccaaagaaatttcaaaaagatgttatatgacatgttttataatttggagagtatcagtaaaagcgactatatttgcaccgttatcctgaaaacaatctttttaccttaaaaaaaactaatacctattgaaaactgaaaaatggagctttgtgaaaagccccattttttttgctttatactgaaggtcacgaagccgtgttattcggtgtttgagagggggattcttcttcacatctattgcttttttgccttgaaagaaccgatttgaagaacgagtttaagaaccgttattgtaatcgctgataaaagtctttcatataacttttccctatcggtatgcgcatatttccgatttttacgacattgcgttctatgttatctattttattaatagctatcagatatgacttgtgaatacgtataaactgcttggcaggtaatagcgactcaatctctttgaaactgagtaaagtcatgattcttgtagtgtcagtgatcacatgaagataggctccttttccttctatatataagatgtcgcataggttgatgcgtaccatccggtattctgttttaagaaaaatataatctttgggaagtggctgggctgggggattggatgccatttccgtctgcaccttgttcactgcttttagaaagcgttcaaaggagtaaggcttcagtagatagtcggtgacgtcatattcgaatccttctacggcatactctccataagcggatgtgatgatgatatgcgggcgcgtatggagagctttcagcaactgaataccagtaaactgttccatctgtatatcaaggaacagtaagtctatcgtattggattgaaggaaatcaaaagcatccaggccattatcaaaggtgcctaccaaatccagtaaaggtactttgctgataaagttctttagtttgtctacagctagtggcgcgtcttctactataatacaatggatcatgtgagcttaatcgttaatgaaacatcaaagtaaccgtttttctgattgatttgcaaatcatatctgcgccgatacaagatatctagtcgtcgccttataatattcaacccgataccgctggaggaatctttgttgatttgctttgccggatcgaacatattgaatatttcaaaatgtatctcggatttctgaatctgaaaaaacaggcggatagcttcaggagctttcttatccgtacaatgcttgaaggcattttcaataaatgcgatgaacagcataggagcgacacgaatattatctggtgatccttccagcctatatgataccaaattcggattatcatattgtaattgttgcaggtcaaggtaattgtggatgtatttaagctcttgtgcgagatcaacttcgggagtattggtctcatagatcatatatcgcatcatttccgacatttgtaccagtgattttgaagctttctccggataggaacaaatcagactatcaatattattcagagtgttgaatagaaaatgcgggttcagttgatttttcaggagattcagttcactttgaagattttgcctttttaattctttctgtttttccttcttttgaaaccaatcgtatagtatatacaatagaatacctgttacagatgaatacaggaaataactgatgacccatagcataataccataatcgttgtcgcttttcagataataaaagagactaatgaaggcgaaagataaaataaagccataatacccccaaactttctttttggtgtataagtgacagctaagatatgaacaagtcactgtgaatatggaaagataagggatagtctgccccacagaactagcaaatgattggagagaaaagattctggcgcttagagtcgttaacatagtaaatactccattaataaggaaataagcgagaacaggaacaataagtcctatcttccggatgctgatttgtgatgttttgattttcatattttcttcttatttagtaaaacctatcacaaaactccgtttatttttcctctttaaaaaattaaatgaacgaacagacggaatttattcacaagttaacctttgcaagatatgaaaaaaaacagaaagttttccaacttccttccttattcgtatctttgacgacgtattgaagaggtatctcttcagttgaattcaaaatttaaaattcatattatgttttctggaatcgtagaagagtacgctactttggtagcactggtgaaagaccaggagaatatacactttacatttaagtgttcgtttgtaaatgagctgaagattgatcagagtatttctcacaacggagtatgcctgacggtagtgagtctgaccgatgatacgtatacggtaactgccatgaaagaaacgctggaccgttcgaatcttggtttgctgaaagtgggcgataaggtgaatgtagagcgcagcatgatgatgaatggccgactggatggacatatcgtgcagggacacgtagatcagacggctacttgtgtggaaatcaaggatgcggaaggaagctggtattttacatttaaatatgcatttgataaagaaatggcgaaacgtggctatatcacggtagacaagggttcggtgactgttaatggtgtcagtctgacggtatgcaatccgacggatgatactttccaggtagctatcataccttatacttacgaatataccaactttcatacatttgaaatcggtagcgtagtgaatatcgaatttgatatcatcggtaagtatatcagccggatgattcagtatagataattaaaaaatagatgtctgatggattttttgcaattggtactgtctcgtcagagtgaccgggcgtatgataaagagcgtccggtagaagcggagaagctggagcgcattctggaagctgctcgtctggctccttctgcctgcaatgcgcagccatggaagtttgtggtcgtggcggaccatgagctggcttcaaaagtggggaaggcggcagccggactaggcatgaataagttcgccaaagatgcccctgtacatattctggttgtagaagagtctgccaatattacatccttgcttggaggaaaagtaaaaggcaagcatttcccgctgattgatattggaatcgctgctgctcatatcacattggctgcagagaatgaaggactgggttcctgcatcttgggctggtttgatgaaaaagagatcaagcaattgacaggtattcctgcttccaaacgtttattgctggatattgcaatcgggtatccggtgaaagagaaacgaaagaagatgaggaagccgaaagaaaaggtcatttcttataatcaatactaattgaaaaaagattactccttggacttgccggagtagatatacagtaaaaagcctcgttggtttaaaaggaagaggtcgttcctttaaaaccaaggaggctttcctttaaaaccaacggcctgtttcttttaaaggaaaaagttgcagtctttaatctgttgattataagatagttgtctaaatacaattctcaaaattgagaattggtaaaaaacaaagacgtttaaaggcgtttttataggtctttcagcagtactttacttgccttcttatagtattcttctctggattcagtcagtactttccattcgtcattaaactcctcatccttgtcgatcttgaagttttcggacccataagtatccagtcggtcgagcaagatggctacattcagctggttaatatccatagagggttggtaaccgatatcttcactcttttggtcggacactacttcatggatcaggtctatttcttgtaattgatagagtacctgattagtcagccggatggggatttgatgctcttccgatatctctgctgctgtataaggcggttcattcttttcgaaacgcttggcgataagcgacatgatcaggatagagataaagtcccgataacgtctgctgatgttgcgggtatcctgatcgaagctaaagctacggatattttgtccggcatacgtcaattcagctccgaacagacagatggtccatgagatttgcaaccagagcagaaacaaggggagggcggcgaagctaccgtagatagcattgtatttcgatacccataactggctgttgatatacaggaactggaaggcctgataagcggaacctgccagaatacctgcaatcagagcgtgcttgaatttcactttcgtgttgggcatgaagatatacaagcccgtaaacatcagccaagttaatacaaatgggataaggcggatcatgaacttcatgacgggagccagtaaaacgaaatcgtccatctgcttcagcacggtactcacaaacagggaaagaccgcccgataccacaatcagaatcggcatgagcaggaacatggagaaatagtccgtaatcttccggtacatggaacgcgccttctttacttcccaaatgcggttgaaagtgatttcgatattgctcaccagattgatcacggtccataacaacatcaccagacctactccgatgaaaataccgcctttggtttgcgagaggtaggagttgacgaaagaaagaatagcttccgtcgtttctatatttcccccgaagccgctccgaaactggtgctccatcaaattatcaaatccgaatccgcgggccacggcgaataggatggcgagtataggcacaatagcaagcagtgtgctgtatgtcagtgctgaggccttgtttgccatccggtctttagtaaatcggttgatgcagagatagatggttttgataatattgtagagcgagaatttcgttctagtcacttcatcttccgtgatgcgccagatgtcatacgtgatgaatttccatatatcggtgattttcttcttcatggctcagaattttaaaaaagcagtttaaaaaagaaaaaaagcagtcagcctgtaagccgagttctgtaccttatagatataaggtgcctgtcatttatctgagtggcgtgtcaccacgacactttagcggtctaccctccgacatggagcgagcagctctcataacgccggtttacatgaccttacaactcctaagacgtacagcccgtatgtcgccatacgactggtaggctcttaccctaccttctcacccttacctctccccgaaaggagcggcggttattttcttctacgttactctaccctcgcggacagctttctgttaggaagtaggatgctctgtgttgcccggactttcctcctgcgcgaaacgcgcacgcgacagaccggccaactgctttagactgcaaaaatacgtcatttattttgttttagccaaagaaagtgtcacaaatagaaataatttctacctttgctatcattaaatcatgattcaatgaagaaaaatatcctttttttctattgcttgctggtagtagcggtagttagtctgaaagctcaggaaatacgccccatgcctgctgattcggcttatggggtagtgcacatttctgtttgtaatatgcgcgatgaaggtaagtttacatccgggatgagtacgcaggcgctgctcggaatgccggttaaggtattgcaatataccggctggtatgagattcagactccggatgactatacgggatgggtacaccggatggtgattactccgatgtcgaaagagcaatacgatgaatggaaccgtgctgagaagattgtggtgacttcccattatggatttacgtacgaaaaaccggatgatgactctcagaccgtatcggatgtcgttgcaggcaaccgtctgaagtgggaggggagcaaagggcgcttttacaaagtgtcttatcccgacggtcgccaggcatatatctccaaacatatttcacaacccgaaacgaagtggagagcttcattgaaacaggatgtcgaaagcattattcaaactgcctatacaatgatcggaatcccctatctgtgggcgggaacttcttcgaaaggagtcgattgcagcggtctggtccggacagtgctttttatgcacgatataatcatcccgagagatgcgtcgcaacaggcttatgtaggcgaacgcattgaaataacccctgatttctccaacgtgcaacgcggagacctcgtctttttcggtcgcaaagccacagccgaccgcaaagaaggcatttcgcacgtcggcatctacttgggcaacaaacgcttcatccatgccttgggagacgtacatatcagcagctttgatcccgaagacgagtactacgacgagttcaacaccggccgtctgctttttgccacccgcttcctgccttatataaataaggagaaaggcatgaataccaccgaccataacccctattatctatatgactaatcattatccattatcaattatccattatccattcaacaaatgccaaatagaagagatttcctgaaaacggccgcctttgcaactttaggttccggaatagctgtcagtcaggcattggcgggagaatctataacttccaccattcatataaacaaacagggtatgggaggaaagatgaaaatgacttttttcccttatgagttaaagttgaggcacgtctttacggtagccacttattcgcgcaccaccacacccgatgtgcaggtagaaatcgagtatgagggagtgaccggatatggagaggcgtcaatgcccccttatcttggggagacggtggagtcggtgatgaacttccttaaaaaagtaaatttggagcaattcagtgatccttttcagttagaggacattttgtcatacgttgacagtctgtctccgaaagacacggcggcaaaggcagcggtagatattgcccttcatgatttggtgggaaagctgctgggagctccgtggcataagatatggggattgaataaggaaaagaccccttccaccacctttacgatcggtatcgatacgcccgatgtggttcgtgccaaaacaaaagagtgtgcagaccggtttaatatattaaaggtaaagctgggaagagacaacgataaggaaatgatagagacgatccgttcggtgacagaccttccgattgccatagatgccaaccagggatggaaagaccgccaatatgcgctcgatatgatccattggctgaaagagaaggggattgtaatgatagagcagcccatgccgaaggaacaattggatgacattgcctgggtgacacagcaaagccctctgccggtgtttgccgatgagtcgttacagcgtttaaaggatgtgcccgctttgaaaggcgcgtttacgggaatcaacatcaaactgatgaaatgtaccggtatgcgtgaagcatggaagatggtgacgctggcgcacgctttgggaatgcgcgtgatggtgggctgcatgacggagacttcgtgtgcgatatctgctgcctcgcaattttctccggcggtcgattttgccgatctcgatggcaacctgctcatctccaacgatcgctttaaaggggtagaagtggtgaaggggaaaatcaccttgaatgacttacccggaatcggtgtcatgaaaatctgatcttactgaatgaatgtcagactgttaaagccatctgacatacaacgaatgtaaatttgtcagttgctgtcgttaagcgctgttaagcctcaaatattctctgttaaaagaggacaaaaaagagtgacaagtagaataagtgaacgatatttgttattattttaacgtcgtaaaagttaaaacaatgtcgaatattaacattttaaagaattataaatcatgaaacagacaacaaagaacattctgggagtaggagctattattcttcttagctcaggagttgcaggattgacaacttacaaattgttgcaatccaatgatgctgccaaagagacatcttttaatgagatgttccagcagaatcccaatgtcaaattggctgcttttgacgcggtaaacgctcaaccggttgacttgacacaagctgcggagaattcgcttcatgctgtcgtacatataaagtctactcaggaagctaaaacaagaaccgttcagcaagcgccggatatttttgacttcttctttggagacggacgcggacagcagcgtcaggtacaatcccagcctcgtgttggttttggttccggagtcatcatttccaaagacggatatatcgtaaccaacaatcacgtaattgaaggtgccgatgagatcagtgtgaagctgaatgataaccgtgagttcagaggacgtgtgatcggtactgacccgagcacagaccttgctttgatcaagattgagtctgatgatgatctgcctactattccggttggagattccgaaacactgaaagtaggagagtgggtactcgccgtaggaaaccccttcaatctgaactctacagtgacagcaggtatcgtaagtgccaaagcccgtactttgggagtatacaatggcggtattgaatctttcatccagacagatgccgccatcaaccagggaaatagtggtggtgcactggtgaatgcgaaaggcgaactggtaggtattaactccgtgttgtcttcacctacgggagcatacgccggatacggctttgctatccctaccagcattatgactaaggtagttgccgacctgaaacaatacggaacagtacagcgtgccctccttggcatcaagggagcttctttgggcagcagcatcatggaagatcagagtcctatcgataagtccggtactacactgcgtgataaagcgaaagaatttggcgtggtagacggcgtatgggtacgcgaaatcgttgataacggttcggctgccggtgctgatatcaaggtggatgacgtaattgtcggtttagataacaagaaagtacataactttgccgacttgcaggaagcattggctaaacaccgtccgggcgataaggtaactgtgaaactagttcgtgacaagaaagaaaagtcagtcgaagtgacgctgaagaacgaacagggtactaccaagattgtgaaggaagcaggcatggaaattctgggtgctgcattcaaagagctgccggatgacttgaagaaacagctgaatctcggctatggtctgcaagtgacaggcgtttcttccggtaagatgtcagatgcaggagttcgcaaaggtttcatcatcctgaaagctaacgaccagccgatgcgcaaagtaagtgatctggaagaagtgatgaaagccgctgttaagtctccgaatcaggtattgttcctgaccggcgtattcccgtccggcaagcgcggatactttgcagtagacctgactcaggaatgagttataaattaaggtaagaagattgtaggataagctaatgaaatagaaaaaggatgccgtcatacaacttgtcggcattcttttttgttttattagttgaaaatatagtgaaaaagttgcctaaatatgtatgttaacaaattatttgtcgtaactttgcactccaaatctgtttttaaagaatgagacaactaaagattaccaaaagtatcactaacagagagagcgcttctcttgacaagtatttgcaggaaatcggccgtgaggacctgataacagtcgaggaagaagtggaactcgctcagcgcattcgtaagggtgaccgtgtagcattggaaaaattgacacgtgccaatcttcgtttcgtcgtatctgtggccaagcagtaccagaaccagggtttgagtttgcctgacttgattaatgaaggcaatttaggactgatcaaggccgccgaaaagtttgatgaaacacgtggattcaagtttatcagctacgccgtatggtggattcgccagtctattctgcaagcattggcagagcagtcgcgtattgttcgtctcccgttgaatcaggtaggttcgctgaataagatcagcaaagccttctcaaagttcgaacaggaaaacgagcggcgtccgtctcccgaagagttggcagatgaactggaaattccggttgacaagatctctgatacactgaaggtatccggccgtcatatttcggtggatgcgccttttgtggaaggagaagacaacagcctgttggatgtgttggtaaacgacgattcgcctatggcggaccgctctctggttaatgagtctcttgcgagggaaattgatagagctctttctacgttaaccgaacgcgaaaaagaaatcatacagatgtttttcggtatcggacaacaagaaatgacattggaagaaatcggcgataagtttggcctcacacgtgagcgcgttcgtcagattaaagaaaaagcaattagaagactaagacaaagtaatcgtagtaaattgctcaaatcctacttgggataagtgaggaatatcagtttctgaaaaaaaagaattagggtcgcataagttgcacttcttggagtaatcatctgaagaatgtacttatgcgacttttatttagccgttattcgtcaatactatactatgcacaattttatgaagaagtctgctctgatattattcacgcttgttggtctgaacattggcatcgtagccaaagccgaacaacccttacgggaaaaagctcttgcagcgaaaacctattgcgtagagaaagggtttaatacgaattattgctttctggtagatttcagcattccttccggcaaaaaacgtttctttgtctgggatttcaaaggcgattccatcaaatattcaagtctgtgtgctcatggatatggtaaggagagcacgccgaagaaaccggtatatagtaatgtggaaggcagctattgctcttctttggggaagtataaggtaggaatccgttcgtatagtaaatgggggattaatgtacattataaactgcatggattggaatcgaccaacagcaatgctttcaagcgttacattgtgctccattcgtatactccggtaccgactttggagatataccccatgcatcttccattggggattagccagggatgtcctgtgatctgtgatgacgcgatgcggaaggtcgatgcactgctgaaagtcgagaagaagcctgtgttgctatggatatatgaatagaaatactaaatcttaatgataaatagatgatatttcctcttttttgttacctttgccacaattaaaaatttatgatatgaaatacgtaaaaatactatttgcaatggcacttgtgttgacaatgtgctcggctttctctttaaagaaagaccactcaaaaacagtttatgccttcggaattgccgcttcctttacggatacagtcgtgtattttacggatattcaaatattggatagcgcaaaggttagcaaggaaggttttctgactcatcgtgatctgtacagctatcagttgaagaattatgtggaagataacggactgcaacagaatagtacctgtatgatctatttctcagaaaacaggaaaaaactggagaaagaggcaacgaagattctgagtaaatataaaaggaacaggaataccacagtaacacggattgatactgataaattccactttataaaaccggaagagtaaaagattaattgttaatatgataagagatgcaggtttgcatctcttatttttttatctttgcagccgtaactaattggtaatctaatgaaaaagattaaaatattatcccttctcatgggtttggctgcgttgtttgcagcttgtgagaataatgaaaacgaaggtcctgaaggacccgaaccacgtgagcaggtaggacgtacagtgttggtctatatcgtgggggataatggagtcagtgagttatcaagcctttttaaagtcaactttagcgatatgaaggcgggtatggaagaggttgattattccaagtgtaatttggttgtttatagtgagatggtaaatgacgttcctcacttgatttcattgaaacagaagaatggtaaagtagtggccgatactctttttacttatgatgaacaaaatccgctggataaggaagttatggccagtgttatttcccaaacagttagttatttcccggcagatagttatgggtttgtatttttgtctcatagctcttcatgggtgccggccagtaataatgcgaactctcgctccatcggatattatcgtaggactcagatgaatataccggatttccgtgaagcattgtcctctgcttttccaaaaccattaaaatttatattgtttgactcatgtaatatgcaatctgtggaagtcgcctatgaacttcgtgactgttccgaatattttattggttctcctacggagattccgggaccgggtgcaccttataaggcagtagtaccggaaatgtttactgaaacaaatttggcgacgaatatagcagaggcgtattatggatattatgaaaaatcttatacaggggttgctcctgttagtaatgagaattggacgggaggagttgctacttctgtgataaagagtgcggctttggataatttggcagcagcaaccaagacaatcattcctaaatatattcaagagaaaagggaagtagaccgtagtgatatactagcttatgattttaacgatgacgctaattatgattttgaaaaactgatccgaaatttgacaggtggagtagataatacggattatcggtcttggtatacagcctttgaagcagctgttgtatataggaaaacaactctcaaaaactattccggtatcattcatagaatgtttactatggaaggttcggaaggactctctacatatatacctactggcgcaagcaattctactatgaatactttctatcgtactttgtcatggtacactgctgccggatgggatggaactggatggtaagaataaagtcagaataaaaagaaagtgtgccgccctgaagcagcacattttttttatctcccccctacaaccattcatactccttcctcgcaacctccggacacttgattcagacatccgcacttaactgataatgccctacgattttcgcctgtggaaataacagtttcagttctcctaatatccgtagtagcgtttctttttgttacgtcgccgtgtattcattggtgctaccccctccgggtttctcgtcaagtttcggagaatcttcgttttcttcctcagcatccgctttgtagagagaatatttcatcaccttacacatatgttttattaaaacgctgcaaaggtaaaaatcgtttgcaggtgtggaaaaaccgtgaagcaccgcattggtaataagggtaaggagagtacattcctttttatttcgacaaaaaaatcggttgaacattgtgtagggtagttcattttatatagtttatggcgaaaaaagaatctcaattatgaacttaaaaagaaaggattatatgaaacagcatagctttacagactttgtttacgaagttattggcgagttgcggcaagagaaccgttttgcgacggcctatatctatcactatgccttgcaggcattcaccgcttctgtaggtggtggcaaaatattttggggaggactgaaccgaagaagcttgtgtaaatttcaatattatctggagaaagagcagaagagttataacacaacttctacttatatccgtgcgctgcgtgctatttataaccgtgcggtagatcgtggggttgtggcgggagaatgtcgcctgtttgtcaatctcaaaacaggggtatcttccgaacataaattggcattaactgccgggcagacgagccgattgctgggtgatgttgttgacggaaagtattcttccggcagactctccagtcctgtactccctccggaggtgtaccgggcgcaggacacaatgcgattgatgctgttgctgcaagggatgccttttgtagaccttgctcacttgcgcaaagtggatttgaaaggggacctgctgatatgccgacgccaaaagacgggtactgaactttgtgtcaagcttatgccgcaggcacgtcagcttatcgaacgttataggagccgggaagaatcttcgccctatctgttggatatccttactcccacttcttccgatagagaagcttttgatgattatcgccgttgcttgcgtaagctgaacttcaacctttcgagactacccggactgatgggaatggaggaggtaaaagtcagttcctacacggcacgccacacttgggctacacttgccaaatattgccaggttcccgaagaggtgatttccgaaggactgggacattcttcacttgaagtcacacggacgtatctcaagagttttgaaggggaggaacttaatcgggcaaatatagtcgttaataattacataatcacaggggaaaagagaatgtggaatgaagcttaagatgctgttacttcgtaagtaacagatagttatcgatgctgcaaagatataagaattttaataaaaaatatattatttacaaagttattttcattagatcactaaaaaagtttcgacacaaggcaaaaaacaaggatagggatacatactagttgcaagagttatgaaaacgcatataactttttcttcccactttgaaatgaataaagcggaatacactgctatttgtctttcttgacttaaataatctgttgataatcagaattatggtagaactgcgctctgttctgtcataaaacaagtttctgttacttacgaagtaattttcgcctatacaaacggacaacttaagtataatgaagcaaaaaaataaattcataaaagagcgtcttaagcacaaacaggagcagctttccatgcaggcaatcagacaggaacgtcttaaccgtaccatgcaaaataccaaagatgatattgatcagctcatctatgcccttcacgaactggaagaagccgaaaaaggtaatcataaacgtcatactattccttataatgaagtcttcagtttctttacgcgcatctgccgtctgttcgactatcttcaacaccgttgccataaatattttaattaccggctgacctgccttgtgatacacgcccattaccgatttcgcagccggacacgggcacccggtcgtgagtatcttagtcccggaaccatacttacctatttcaagcatgaacgggaaatggttgtataacttcgaacttaaaataatcattgcatttataacacttcttttttcttagggatctgatagcgatttacattattaattaataactagagaatatgggaaaattaaaacatttaggtatgtcactcctcttggcaacaacatttttcagttgcggagatgactatgacgacactgctttgcgcaacgatgtgaacgaccttaaatcgagagtagaaaaactggaatcatggtgcagcactaccaatacacagatcagcgccttgcagggactggtttcagcattggaacagaatgactatgtgaccggagttactcctattgtagaaggatcagtagaagtgggttacactatcactttcactaaaagcaagcccatcaccatctatcacggcaaggatggtaagaacggtgctgacggtataaacggtgtcgacggcatcacccctcttattggtgcggagaaagataccgacggtatatattattggactataaagctcggtgatgccgattctgcatggttgactgatgctgataacaataaaatacctactaccggtaaagatggagaaaatggaaacgatggtgaacctggaaacaatggtgagcctggtaaggatggtgagcccggtcattctcccgttatcagtgtagatacgtttgaaggcaaactgtactggaaagtagatgatgaatggttactggacagtaatagtaataaagtggctgccaccggtgaaaagggagataccggttccgctgggaaagacggggagaaaggtccgcaaggtgagcagggggattctgttttcaaaaaagacggtgtgaaaatagaagacggcaaagtgatcttcacattagcaaatggaaaggaattcacgcttccgatgctagttgacggcctcgctgtgggtattggtggcagcgatttgttctatgcatctccttcagacaattctatagatatcacttttgcttctactatgaaagaggaagattataaatccattgttactactattacgaatggtaatgaagcagactggattattaaaagtcgtggtgcggcagatacatggaaagtatcagtaacggaaccgacttttaccggcacagacggaacatatactctgggaagtgcaaagattactattacccctccggcaaatgtcaaactgtcggatacagctctattgacggtgacagtgactgacgctaatgatggtacaatatcagtttcgagagaagtaaaatattttgatggtgagatagtggcatgtaccggaggtgatttaagtatcaaagggttggatacatctgtgaaaagactggcactaaagggctctatcacggtagaagattttaaatatatcagagaatcattaactgcacttgaagtgctggatatttcgatgaccgacttgactgaactgccggatcgtgcattacgtttcggtggtgatacaccaaacacttcattgaaagcagtcagactgcctttatctatgaaaactatcggttatgcagctttcactaattgcagagcattgacaagtattgatactgagaatgtggaaatcataggtgaatgggcattcgaacaatgccgcggtttggtggaagtgaaattgcacgacggattgaaagagattcgtagacaagccttcaataactgtatttcactgacatcgatagatattccaggtagtgtaacagatttgggcaaaaatacagaagtatctacgtcacagtatgaaggttgggtgtttgaaaactgtacgaatttaagtacgatcactttgcatgagggtttaaagaaattatatgtctcaaccttttctcgttgtggagtcgtatctatcaatatacctacgacagtaacagatatccctgactatgcttttcaggaatgtcagaatctggagcgcgtcacatggcataatggtatcactcagataggggaggctgcatttttaagatgccgttcattaaaggctattactattcctacaggagtaacagtactcaggaataatctatttgatgaatgtgcgaatttgcagtatgtgacattacatcataatatcactgagatacaagtgagagctttctcttattgcactttacttaagtcagagtttttcccttacgaagatgtttatatagatagagcagcactccccaatgcactgcaaactttaggagcaggtgtatttacggattgtaagaacatggaaagtattaatatgcaacgtacacaggtgaaaaatatactcaggaatacatattccggatgtagtggtataactaccttctattatccgaatgtagtagaaacaatcggtgagtttgctttttcaggttgttctgcgttagtgggatcttttttcccggcttcattaacatccattgaaacaaatgcattccacttatgtacgaaaatgagccaagtttactgtttgggaagtactccacctacgcttggtacggctgcttttgattcttctctaaaatcaataagtacactatttgtgccagaggctgcgatttcggcatatagtagcagtagttggaatccctattttaaagaaataaagaaagatttactccatccataaaattcagaaattcaaatgataaccaggttccgttgcttttcttggcaagaaaggtggcggaatctttgttttgttacactgttctggcaattcgatataataaaacttaaacatattcttccattttttttatcttttttattccatacgtttgtaaatggcaagctttttccgcaagtttgtatattattaacgctcactgattcatcgatattaattttgtagtcgtgatttttatctattcaatcctttactcacgcgtgaatatatattaatgtataaagaaaatagcttttacaattacagtagaaaaagatactctacaatatcattgtcaatcaggtggttacagaaaagtttcaaaaaagtggtagaaaatagtcagatatatttggattgtatagcaaaacctcgtacttttgcacccgctttccaagagagggacagcctaacaattgacattctgctaaagtttaaggcttcagaaaataaaaacaaaaaaacttcgaaaaagtttggaagttatctgaaaaagttcttatctttgcatccgctttcgctaagaaagcagcgcgacagaagtcacgttagttctttgaaatattgataaacaatacaagtagtacaagaaaaaaaatagaaccgtcaatacttgtcttatatatatagtaatatgcatgagacgtaaggtattaatgaagtcaataaattgtacggcatcctgaacagagcaaaaatcagctttatgctgactaacaatacttttacaatgaagagtttgatcctggctcaggatgaacgctagctacaggcttaacacatgcaagtcgaggggcagcatttcagtttgcttgcaaactggagatggcgaccggcgcacgggtgagtaacacgtatccaacctgccgataactcggggatagcctttcgaaagaaagattaatacccgatggtataattagaccgcatggtcttgttattaaagaatttcggttatcgatggggatgcgttccattaggcagttggtgaggtaacggctcaccaaaccttcgatggataggggttctgagaggaaggtcccccacattggaactgagacacggtccaaactcctacgggaggcagcagtgaggaatattggtcaatgggcgcaggcctgaaccagccaagtagcgtgaaggatgactgccctatgggttgtaaacttcttttatatgggaataaagttttccacgtgtggaattttgtatgtaccatatgaataaggatcggctaactccgtgccagcagccgcggtaatacggaggatccgagcgttatccggatttattgggtttaaagggagcgtaggtggacagttaagtcagttgtgaaagtttgcggctcaaccgtaaaattgcagttgatactggctgtcttgagtacagtagaggtgggcggaattcgtggtgtagcggtgaaatgcttagatatcacgaagaactccgattgcgaaggcagctcactggactgcaactgacactgatgctcgaaagtgtgggtatcaaacaggattagataccctggtagtccacacagtaaacgatgaatactcgctgtttgcgatatacagtaagcggccaagcgaaagcattaagtattccacctggggagtacgccggcaacggtgaaactcaaaggaattgacgggggcccgcacaagcggaggaacatgtggtttaattcgatgatacgcgaggaaccttacccgggcttaaattgcatttgaatatattggaaacagtatagccgtaaggcaaatgtgaaggtgctgcatggttgtcgtcagctcgtgccgtgaggtgtcggcttaagtgccataacgagcgcaacccttatctttagttactaacaggtcatgctgaggactctagagagactgccgtcgtaagatgtgaggaaggtggggatgacgtcaaatcagcacggcccttacgtccggggctacacacgtgttacaatggggggtacagaaggcagctacctggtgacaggatgctaatcccaaaagcctctctcagttcggatcgaagtctgcaacccgacttcgtgaagctggattcgctagtaatcgcgcatcagccatggcgcggtgaatacgttcccgggccttgtacacaccgcccgtcaagccatgaaagccgggggtacctgaagtacgtaaccgcaaggagcgtcctagggtaaaactggtaattggggctaagtcgtaacaaggtagccgtaccggaaggtgcggctggaacacctcctttctggagcgatgtcgtaacaacgatttcataggttctattattgtactactggtacttgtttatttataacatatagatcaaccatctatagaagtatagatagagataaacaagagaaataaagaagccgagtctaacatcaggtagacaaggttgaactagtcctatagctcagttggttagagcgctacactgataatgtagaggtcggcagttcaactctgcctgggactactccgaacaaaaattgtcgttgccaatacattattgcgatgttcaattactcttgggggattagctcagctggctagagcatctgccttgcacgcagagggtcaacggttcgaatccgttattctccaccatctctgaaaacagagaaacgatctttgacatgatgtacaaaaagtaaaatttagtaaagagctaaaagtatatatcgaaccgtacgttttaagtaccgcgatattgagtacccgggtttaatacctgatacttgatacctgatacttaaaggtaagtttgaaagaaagtaagcaagggcgcatggcggatgccttggctctcggaggcgatgaaggacgtgataagctgcgataagctctgggtaggtgcaaataacctttgatccagagatttccgaatgggacaacccggcattctgaaggaatgtcatccatctttgatggaagctaacgcagggaactgaaacatcttagtacctgtaggaaaagaaaataataatgattcccctagtagtggcgagcgaacggggaatagcccaaaccacccatgttacggcatgtgtggggttgtaggaccacgatgtcgcaagacatttgacgagtagaatcctctggaaagtggaaccatagacggtgatagtccggtatacgaagtcaaattaagcgtagtggtatcctgagtagcgcgggacacgagaaatcttgcgtgaatctgccgggaccatccggtaaggctaaatactcccgagagaccgatagcgaaccagtactgtgaaggaaaggtgaaaagcacttcgaatagaagagtgaaatagtccctgaaaccgtgcgcctacaagcggtcggagctgcgtaagcagtgacggcgtgccttttgcataatgaacctacgagttactttttccggcaaggttaagcatcttgagatgtgcagccgaagcgaaagcgagtctgaacagggcgtcgagtcggaaggagtagacgcgaaaccaagtgatctacccttggtcaggttgaaggttaggtaacactaactggaggaccgaaccgataagcgttgaaaagcttccggatgaactgagggtgggggtgaaaggctaatcaaacttggagatagctcgtactccccgaaatgcatttaggtgcagccttgtgagttactaatgtgaggtagagcgactgataagatgcgagggcttcaccgcctatcaagtcttgataaactccgaatgcgcattagttctatcacaggagtgagggcatgggtgctaaggtccatgtcctaaaggagaagaatccagaccatcagctaaggtccccaaataaacactaagttgaactaacgaagtcagattgctaagacagctaggatgttggcttggaagcagccattcatttaaagagtgcgtaacagctcactagtcgaggagtttggcgtggataataatcgggcattaagtgttttaccgaagctatgggatcagtaatgatcggtaggggagcattccactctgcgtcgaaggtgaagcgtgagctttgctggagcgtgtggaaaagcaaatgtaggtataagtaacgataaagggggtgagaaaccccctcgccgaaagactaaggtttcctgatcaacgctaatcggatcagggttagtcgggtcctaaggctcagccgaacggtgaggccgatggcagaacaggttaatattcctgtactaccttaaggagtgacgtggagacggaggcgtgacagcgccgcggactgacggaatagtccgttgaagggtgtagatgttgattatcccaggcaaatccgggataagagtcgaacctgatagtatggagcgttcttcggaacaatccaatagtgcgtgtaatcatactcccaagaaaatccgctaaacttaatccttgaggtacccgtaccgcaaacggacacacgtagtcgggttgaatatactaaggcgcttgagtgattcacggttaaggaactaggcaaattgaccctgtaacttcgggataaagggtcccaacgagagttgggcgcagagaataggtccaggcaactgtttaacaaaaacacagggctgtgccaaattgaaagattacgtatacagcctgacacctgcccggtgctggaaggttaagaggagatgtcatcgcaagagaagcattgaattgaagccccagtaaacggcggccgtaactataacggtcctaaggtagcgaaattccttgtcgggtaagttccgacctgcacgaatggtgtaatgatctggacactgtctcaaccgtgagctcagtgaaattgtagtatcggtgaagatgccgattacccgcgatgggacgaaaagaccccgtgaacctttactatagcttaacattgaatttgggtaattgatgtgtaggataggccggagacttcgaagcaggtacgccagtatttgtggagtcgctgttgaaatacggccctttgattatttgagttctaactcgtggtacgaggacactgtttggtgggtagtttgactggggtggtcgcctccaaaatagtaacggaggcttctaaaggtgccctcaggacgattggtaaccgtccgcagagtgtaatggcataagggcgcttgactgggagacttacaagtcgatcaggtaggaaactagagcatagtgatccggtgtttccgtatggaagggacatcgctcaaaggataaaaggtactccggggataacaggctgatccctcccaagagctcatatcgacggaggggtttggcacctcgatgtcggctcgtcacatcctggggctggagaaggtcccaagggttgggctgttcgcccattaaagtggcacgcgagctgggttcagaacgtcgtgagacagttcggtctctatctatcgtgggcgtatgaaatttgcgtggctctgacactagtacgagaggaccgtgttggactgaccgctggtttaccagttgtgccgccaggtgcattgctgggtatctaagtcgggattggataagtgctgaaagcatctaagtacgaagccagccacaagattagatttcttagggtcgttaaagacgatgacgttgataggatgcaggtgtaaaggtggtaacatcaaagccgagcattactaattgcccgttcactttctttcggacggtgcggatcgcgatatatacgtttagcttttttaattgacaattgacaaatgacaattgacaattagattaacagatacttgaattttactttttatcatgtcataacttatcatgacagctgcgataattgtcatttgtcaattgtccattgtcaattgaagaaattcaggtggttatagcacgagggttccacctcttcccattccgaacagagaagttaagcctcgtcacgccgatggtactgcgtaacagtgggagagtaggtagccgccatttttagagaagcccttccggtagaaataccagaagggctttattgtttatacactttcctgtccgatttttgggttctcctgcttattttctatgattcagccaaatttatattctttttcttttgttatttcggaatgaatatatacttttgtggtgtactattaagctaatacactagacgtcgtgtattaactataagaacttaaaaattaatattatgattaaagctgaaaatttgtcttttatctatcccaaatcaaagcgcatggtattacacgacttttctttctctttagaggctggtcgggtttatggactgttaggacgcaatggggcggggaaatctactctcctttatttgatagccgggctattgacttcgaaaaaagggaaaatagtgttccatgatataaatgtccgttctcgtctgtcaatgacgttgcaggatatgttcttggttccggaggaatttgaattgccttctattccattgaaaaagtatattgaattgaatgctcctttttatccgaactttagcaaagaggatatgcacaagtatcttcattgttttgaaatggatatggatgtgaatttaggagcactctctatgggacaaaaaaagaaagtgtttatgagttttgctttggctaccaatacttctcttctgctgatggacgaaccgaccaatggactggatattccgggaaagagccagttccgtaaatttatggcatcgggtatgacagatgacaaaacgattgtaatttcaactcatcagatacgtgatatagacaaaatgctggattcagtcatgatcatggatgaaagccggatattgctgaatgaatcgataacgcgcatttgcgagaaattgtgcttcaaggaaagtgatgaccgtagcctgattgaccaagcactttatgttgttccatctctacaggggaatagtttgcttttgctgaatgagtatggtgaagattcagatatcaatttggaactgctgtttaacgcaacactggcacaacaacaaataatcgcaaaattgttttatgctcaagatgaacagatatgataaaggatacattttttagtttctcccgtttcgggaaattattctataaagagatttcagagaattggaagttgtatgggctccaagtattggtgatgtatgtagcgatggcaattacgctaatttggtatagctatactgattatacaagtttcaatacacttgctaaaacaaatgatttgaatgttcatatatttacattggtcttttggatgtggtcttggtggatatttatctgcttggggacttcttttgcatttaaaacaatgaaaggtaaaacgggtcgtattacgatgttaatgactcctgtcactgcctttgagaagtttttctttcgttggttgatttatgtacttgttctccctttgctcattttgctatcaatttggttggcagactatacacgtgtatttgtttattctgcaatataccctgaaatgccttttatagaagttacagacttcaaacattttgttgatcagggagatgggggatattccttatgtcatagttgggtagatggttctctgttgattttacttaatgtgtatattcaatcattctttttattgggaagtattatttggcctaagaattcttttataaaaacgcttattgcttttgtgctttttgttttcctgtattattgggtagtggtaggattttctcattttacagagaatagtgctcttgcaaatttgaattcatttatctttaagtggggacatgtactattccctgtattaactataataaattgggtcttgacttatttccgcttaaaagagtcagaagtaattcatcggatgtaaaaaaggagggtatgtatgaattttaaagaaagcagagcaatatatttacagatagccgatcgcatttgtgatgacatcttgttgggacaatatgaagaagagtggcgtattccttcagtcagggagtatgcatctattgtagaagtgaatgcaaatacagtgatgcgctcctacgagtatcttcagtctcaggaagtgatttacaataaacggggcattggcttttttgtagcttctggagcaaaggcactgattcattcgttgcgaaaggaactgttcctgaaagaagaggttgatggatttttccggcaactttatacactcggcatctctatcaaagaagtagagaagatgtattatgaatttatacaaaaacaaaatcaataaaaaacagatatgatatgaagcgtacaacatatataataataggactttttgtactgggcttgttacttatccctgtcctgttaagaacacctgcgggcgagaaagtagctcgtcgtttatcaatggaaggggagcgtactgaaatagaaatggctgggattcgtcatgtgaagatcgttgaaaagctaggtaagattgataaagatggtataggaatagcaggtcagctggatgtgcaggcttcccccgctttgggtaagagcatctttgcgtatccgaagagcaaatatctgaatgtaacacaggaaggagattgcttgctgatagaagtagatatggataatgaaggtctctcgcagatagtacaatcgctggataaaggacgcatattaattttagatgggttgaatctggaattaaaagcagattttacattgctttctatcgagaatcgtgctgtcagggtggatattaatatcaagaaactatgcttggactccttatttctctttaatgaagaatggcaggatatctcactggattcttgttgtttccgttcgttagatatcaaaggaaagagattgagcttgaaggctgatcaagtgaaagtaactgattattatgaagaattagggactatcaggagtagtgagatttccggattcagtgttgataatttgtatctgtcaggaaaagattcgcatagatatcggacaggcatcaattgtaagcgtatcttttggaatcccttagctgaagatgcggaacttgagcttactttgagacagaagggtgagattatattgaatcattgaatataaacggaaaggaaatgaaaactataaagtgttttgctgttttaagtctgttggctggtttgtccggctgtaattcaaagccggacttagatggattccgggaagtagagataagtaataatatactggatactataccggaaaacagattgaataattataaggaaacgatcgaaaagacttatttatttggttgtctggtattgggtacagccggtagttcgtcggaaagcagtccggctcgactgaaggaatggaaagagtctttgaatatgcccgacacgataaacccgatctatagggagaggctgtgggactttgttttttatccacaaattacgtatgaagttgaatccagatacctggggatctatcagcggagaaaaactgtaattaaaggtattgggcttggtatgattacaggaaaagaagaagaatatatcaaatcaaggcaaaaataattcattgttgatgctttattcgttataatattttaagacaggtgtcatttagtaatataaccgtgagaaaagcggaataaaattggtgtaaaagtgtgattttataagaagagagtcgatttctttgcatctttctcttttttatcaaattgatttttgtaaatttggcgagaatctattgaaggaacataattaatacagtaataatactaaatactcctgttaatatggaaaacaaaattcaagagttgaccgataagatttatcgtgaaggcgtggaaaaaggaaacgaagaagcgcaaagacttatcgcgaatgctcaggatgaagcaaagaagatcattgaggatgctcgtaaagaagcggaatcaattgttgccgcctctcgtaaatctgctgatgaactggcagataatacaaaatcagagttaaaactattttccggtcaggctgtcaacgcacttaaatctgagattgccacgatggttactgacaagttgataaccgcttctgtgaaggatttcgctcaggataaggattatctgaatgcgtttatcgttgcgctggcatccaaatggagtgtagatgaacctattgtcatctctacggccgacgcagaatcactgaaaaagtattttgcagcccatgcaaaagctctgttggataaaggtgtgaagatcgaacaagtgaacggtatcaaaactttattcacagtttctccggcggacggttcgtataaggtgaatttcggagaagaagaattcatgaattacttcaaagcgttcttgcgtcctcagttagtagaaatgctattttaaaaggagcgactatgagtagtaaatactattacttggtagccggtttgccggaactcactttggaggacagtaaactgagctatacagtagccgattttaaaacagaaatctacagcggattgtctgcttcagaccaaaagttgatcgacttgttctatctgaagtttgataatgccaacgtgctgaaactcctcaaagacaaagaggcggaaatagacaaacgtggaaactactctgctgcggaactcaccgaatatatttctattctgagagaaggcggggaaatcagccctaaagaatttccttcttatctgtctgtttttatttccgattatctgaatacacctgccgaaagcatggtgttgcaggaagatcatctggctgctttatattatgagtacgccatgaaatgcggaaataagttcgtctcttcctggtttgaattcaatctgaacattaataatattcttgttgcatttaccgctcgtaaattcaaatgggatattgctgcccatatcgtaggaaacacggaagtatgcgaagccttgcgtacatccagcgcccgcgatttcggattgtccggtgaggtggatgtttttgaatcgttggtgaagatcagtgagatcacggaactggtggaacgtgagaagaaactggatgctctgcggtggaattggatggaggatgctattttcttcgactatttcaccattgaacgtattttcgctttcttgctgaaactggaaatgattgagcgttggatttcattggataaggaaagaggaaatcaattgttccgaagcatcattgaatcgctgaagaatgaagtacagattcccgcagaattcagataataaatttaaaaaaatatatggcaacaaaaggaactgttagtggcgttattgccaacatggtgaccctcgtcgttgacggaccggtagctcagaatgagatttgttatatctctaccggtggcgataagttgatggcggaggtgattaaggtggtaggtgcaaacgtatatgtccaggtgttcgaaagcacccgtggactgaaggtgggtgccgaagccgaatttacaggacacatgctcgaggtgaccttgggtccgggtatgttatcgaagaactacgatggtctgcaaaacgaccttgacaagatggacggtgttttcctgaaaagaggacaatatacatatccgttggataaagaacgtatatggcattttgttccgatggtgaaagccggtgataaagtcgtagcttccgcatggctgggacaggtggacgaaaacttccagccgctgaaaattatggctccgtttactatgaacggaacggctaccgtaaagaccattatgcccgaaggagattataagatagaagataccattgctatcctgacagatgaagaaggaaatgacatcccggtaacgatgattcagaaatggccggtgaaacgggctatgacgaattacaaagaaaagccgcgtcctttcaaattgctggaaaccggtgtacgtgtaatcgatacgttgaacccgattgtggaaggtggtacaggatttatccccggccccttcggtacaggtaagacggtgcttcagcacgctatctccaaacaggcggaagcggatatcgtaattattgcggcttgtggtgaacgtgccaacgaggtagtggaaatctttacagaattcccggaattggtggacccgcatacaggacgcaaattgatggagcgtaccattattattgcaaatacttccaacatgccggtagccgcccgtgaagcatctgtatatacagcaatgtctttggctgagtattaccgttcgatgggactgaaggtattgctgatggctgactctacttcccgttgggcgcaagcgttgcgcgaaatgtccaaccgtatggaagaattgcccggaccggatgcgttcccgatggatatttctgctattatttctaacttctacggtcgtgcaggttatgtgaaactgggtaacgacgaaaccggttcaattactttcattggtacggtgtcacctgccggtggtaacttgaaagagcctgtaacggaaaatacaaagaaggtagcccgctgtttctacgcattggaacaggatcgtgccgataagaaacgctatccggccgtgaacccgattgactcttattccaaatatatcgaatatccggaatttgaagaatatatcaaggagcatatcaatgacgaatggatcggcaaggtgaatgaactgaaaacccgcttgcagcgtggtaaggaaatcgccgagcagattaacattctgggtgatgacggtgtacctgtggaataccacgtaatcttctggaaatccgaattgatcgacttcgtaatcctgcaacaggatgcctttgatgaggttgactcggtgactccgatggaacgtcaggaagcaattctgaatatgataatcgacatctgccatacagaatttgaatttgacaatttcaatgaagtaatggattacttcaaaaggatgatcaatgtatgcaagcagatgaactactcgaagttcaaatctgagcagtacaaaggattccagcagcaattaaaagaattgattgccgaaagaagcgttaaatagtaaattgtaaatagctaaattgtaaatatatagatggcaacaaaagcttttcaaaagatatataccaagattactcagattaccaaggctacttgttcgctgaaagcgacaggagtagggtatgacgagcttgccactgtgaacggtaaactggcacaggtggttaagattgccggtgacgatgtcactctgcaggtatttgaaggtacggaaggtattcctaccaacgccgaagtggtgttcctcggcaaatcgcctacgttgaaagtaagtgagcagttggcaggacgtttcttcaatgctttcggtgatccgattgacggaggtccggaaattgaaggacaggaagtggaaatcggtggtccgtcagtgaatccggtgcgccgtaaacagccgtcggaactgattgcaacgggtattgccggtatcgacttgaataacacactggtatccggtcagaagattccgttcttcgccgaccccgaccagcctttcaatcaggtgatggcaaacgtggcattgcgtgctgaaacagataagatcattctgggcggtatgggtatgacgaacgatgactacctctattttaagaatgtattctccaacgccggtgctctcgaccgtattgtgagcttcatgaatacgacggaaaatcctccggtagaacgtctgctgattccggatatggcactgactgctgccgaatacttcgccgtaaacaataacgagaaagtattggtactgctgaccgatatgaccagctacgccgatgcgttggctatcgtatccaatcgtatggatcagattccgtccaaagactctatgccagggtcgctctattcggatttggcgaagatttacgaaaaggcggtgcaattcccttccggtggctctattacgattattgcggtgacaacgttgtccggtggagatatcacacatgctgtgcctgataatacgggttatatcacagaaggacagttgttcttgcgtcgtgacagtgatatcggtaaggttattgttgacccgttccgttcattgtctcgtctgaaacagctggtaaccggtaagaagacacgtaaagaccatccgcaggtgatgaatgccgctgtacgtctgtatgccgatgctgcaaatgcgaagactaagatggaaaacggtttcgacctgacaaattacgacgaacgtacgttggcttttgcgaaggactattctaaccagttgctggctattgatgttaaccttgatactactgaaatgctggatgtggcctggggcttgttcggcgaatacttccgtccggaagaagtaaatatcaagaaggagcttgttgaccagtactggccgaaaggagaataatcagcaactaaatttataaccaataattagcaaaaacaacgtggctataaagtttcaatataacaaaacctctcttcagcagctcgaaaagcaactgaaagtgcgggtgcgtacgcttcctatcatcaagaataaggaaagcgccctccgcatggaagtgaagcgctgtaaaacggaagctgccgatctggaggataggctcgaacaacaaattcaagcctatgaagccatgttcgccctttggaatgagtttgacgcttcattgataaaggtgaatgacgttcatcttggcgtgaaaaagattgcgggtgtacgtgtaccgcttctcgaaaatatcgatttcgagatacgtccgtacagtatgtttaacgctcccaaatggtatgccgacggtatccatctgctggaggaacttgcgcatacggcaattgaacgtgagtttatgctcgccaagctgaatctgctagaacatgcgaggaaaaagaccactcagaaagtgaatctttttgagaaggtacaaataccgggctatcaggatgcattgcgaaagatcaagagatttatggaagatgaagagaacttgtcgaaatcatcgcaaaagatcatgaagtcccatcaggaaaaaaggaaggaggaagaggcatgattacaaaaatgaagaaactcacattcctggtttatcataaggaatacgaagaattcctgaacagtctgcgcgaacttggtgtagtccatatcgtggagaaacagcaaggtgctgccgacaatacggaactgcaagagaatatccgtctttccaaccgtctgacagctactctgaaattgcttcagaatcagaagcatgagaaagatgctgtggtcgcaacggaaggagggacagctgctcgtggtttgcaggtattggatgaagtagatgctttgcagactgaacacggcaaattgtctcagcaattgcagggctatgccaaagaaaaggaagcattgcaggcatggggcaacttcgatccggcaagtgtccggaagttgaaagatgccggctatgtaatcggtttctatagctgttcggaaggaaactaccagcaagaatgggagatggaatacaatgcgatgatcataaatcgtatttcttccaaagtattctttgtgaccgtcactaaagcaggtcaggaagtggatctggacgtagaacaggcaaaacttcccgcctattcgctggcacatcttgaaacgttgtacaatacaacggagcaggctattgaagagaacgaaaagaaactggtagcactttctgaaacagatgtaccttctttgaaggtcgctttgagggagttgcagggacagattgaattctcgaaagtagtattgagttctgaacaggctgccggtgataaactgatgttgattgaaggatgggctcctgcctatagtaaagtggagatagaagcctatttgaatgacgcacatgtatattatgagattaccgatccgatgccgggtgataatgtccctatccgattgaataataagggattctttgcctggtttgaaccgatctgtaaactatatatgcttccgaagtataatgaactggacctgacaccgttcttcgccccgttctttatgatcttcttcggactctgtctgggagattccggatatggacttttcctgttccttggagctacggcatatcgcttactggcaaagaaggtgactccgtcaatgaagtcgattctttcgctgatacaagtattggctgtttcaactttcttctgcgggttgctgacgggtacattcttcggagcgaacatttatgatttggactggcctatcgtgcaacgtctgaaacacgcggtgctgatggataacaacgatatgttccagttatcattgattttgggtgctattcagattttgttcggtatggtgttaaaagcagtcaatcagacgattcagtttggtttcaaatatgcagtggcaacgatcggatggattatcctgttggtttcaatggctgtttcggctttattgccgaacgtactgccgatgggaggtacagtgcatctggttattctgggtatctccggtgcgatgatattcctctataacagtccgggaaagaacatattcatgaatatcggacttggtttgtgggattcatataacatggctaccggtctgctgggagatgttttgtcctacgttcgtctgtttgccctcggactttccggaggtattctggcgggagtgttcaacagtctggcagtaggtatgagtccggataacgtgattgccggtcctatcgtaatggtgctgatctttgtgatcggtcatgcaatcaacatctttatgaatgtgcttggtgcaatggttcacccgatgcgtctgacatttgtagagttcttcaagaactccggttatgaaggaggcggcaaggagtacaagccttttagaaatttagaataaaacattgagaaataataaactaagaattaaacaataaaaatagaataagattatggaaatgaatttgtttattgcctacattggcatcgcggttatggttggtttgtcaggcattggtagtgcttacggagtaactattgcaggtaacgctgctatcggcgcattgaaaaagaatgatagtgcattcggtaacttcctggtattgactgcgcttccgggtacacagggtctgtacggttttgccggttactttatgttccagactatcttcggtatcctgactcctgaaatcactgctatccaggcatcggcagttctcggtgcaggtatcgctttgggattggtagccttgttctcggctatccgtcagggacaggtttgtgcaaacggtatcgctgctatcggccagggacacaacgtgtttagtaatacattgattcttgccgtattcccggaactttacgctatcgttgctttggctgccactttcttgatcggtagtgcacttgcgtaaatttttcaaggaaaaaaatttttaataaagatctttcaatccccttgtgaatgcagctttgcgttcgcaaggggatattcttttttcatggcgggctaacctttctttcctcttattaactcatatttttcgcataaagtattatttttcaaagaataatgcgtacttttgcactcgcatactaaaaagagttttaatatattatatggtaaaagatttattaacccccgattatatcttcgagtccagctgggaagtatgtaataaagtgggagggatatacaccgtattgtcgacacgggcgaatacattgcaggaaaaattccgcgacagaatttttttcataggtcctgatgtgtggcaaggaaaagagaaccctctattcatcgagtcggataatctgtgcgctgcctggaaaacgcatgcacttgaaaacgatcatctttccgtccgtataggacgatggaatatacccggtgaacctattgtcattcttgttgatttccaacctttttttgaaaagaagaacgatatatacacagaaatgtggaatcgttttcaagtagactcgttgcacgcttatggcgattatgacgaggcttctatgttttcgtacgctgctggaagagtagtagaaagtttctaccgctacaacctgacagaaacggataaggtggtatatcaggcacatgaatggatgaccggaatgggagcactttatgtacaggaagctgtccccgaagttgctactatttttacaacccacgctacttccatcggacgttcgatagccggcaatcataagccgctgtatgactatctgtttgcgtataatggcgatcagatggcacaggaattgaatatgcagtcgaagcattccatcgagaagcagacggcgcatcatgtagactgttttacgacagtaagtgaaatcaccaataacgagtgcaaggaattgctcgacaaaccggcagatgtagtactgatgaacggtttcgaagacgatttcgtacccaaaggcaatacatttaccggaaaacgtaagcgtgcgcgctcattaatgttgaacgtagccaataaattgttgggaacaaatctggatgatgatacgttaatcatcggtaccagtggtcgttatgaattcaagaacaaggggatcgatgtctttctggagtcattgaaccgcctgaacagagataaaaacctgcataagaatgtattggcattcatcaatgtacccggttgggtgggagatccccgtgaggacttgcaggcgcgattgaaaagcaaagaaaagttcgacacaccgcttgaagttcctttcatcactcactggctgcacaatatgacgcatgaccaggtattggatatgctgaagtatttaggaatgggcaatcgtcccgaagataaagtaaaggtgattttcgtaccttgctatctggacggtcgtgatggtattatgaacaaagagtattatgatatattgctgggacaggatttgagcgtttatgcttcctattacgaaccttggggatatactcctttggaaagtgtagcgttccgtgtacctacaattactactgatctggcaggctttggcctttgggtgaacagtctgaagaatcagcatggcatcaatgatggagtagaagtgctgcatcgttcggactataatgattcggaagtggcggatggtatcaaggatacgattacgctctttgcggataaatcggaaaaagaagtgaaggaaatccgcaaacgtgcggcagatgttgcagagcaggcactgtggaagcacttcattcaatattattatgaggcttatgacattgctctgcgcaatgctctgaagcgtcagttaagctaaaaaaacattttattcatcaataagtaaacaaaaacattatgaaaattaaagttagtaatgtgaatactccgaactggaaagaggttacagtgaaatcacgtatccctgctgagttggagaaattgtccgaaatttcacgcaacatctggtgggcatggaattttgaagcgacagaactatttagagatctagatccggaactttggaaagaatgtggacagaatcctgtgttgttgctggaacgtatgagctatgagaagctggaagctttggcaaaagacaaggtaattctgagaagaatgaatgatgtttatacaaaattcagagattatctggatgtgaagccggatgagaatcgtccgtctgtagcctatttcagcatggaatatggtttaagcagcgtcctgaaaatatattccggtggtttgggtgtattggctggcgactacctgaaagaagcttctgacagcaatgtagatctttgtgcagtaggtttcttgtaccgttacggctactttactcaaacgttgtctatggacggtcagcagattgctaactatgaagcacaaaacttcggtcagcttcctatcgaccgagtgatggatgcgaatggtcagccgttggtagtggatgttccttatctggactattatgtacatgctaacgtatggcgcgtaaacgtaggacgtatttctttatatctgttggatacggataatgaaatgaacagcgaattcgaccgtcctattactcaccagctttatggtggcgactgggaaaaccgtctgaaacaggaaatcctgttgggtatcggtggtatcctgacactgaaagcattgggcatcaaaaaagacgtttatcattgtaacgaaggacacgctgcattgatcaatgttcagcgtatctgcgactatgtagctaccggactgacatttgatcaggctatcgagctggttcgcgcttcttctctttatacagttcatactccggttcctgccggtcacgactacttcgacgaaggtttgttcggtaaatacatgggcggttaccctgcaagaatgggtatcagctgggatgacctgatggaccttggacgtaataatccgggggataagggcgaacgtttctgcatgtcagtatttgcttgcaacactgctcaggaagtaaacggtgtaagctggctgcatggaaaagtatctcaggagatgttctctactatctggaaaggttacttccccgaagaaatgcacgtaggttatgtgactaacggtgttcacttccctacatggagtgctacggagtggaaagaactgtactttaaatatttcaatgaaaacttctggttcgaccagtcgaatcctaagatttgggaagcaatctataatgtgcccgatgaagagatctggaagactcgtatgacgatgaagaacaagctggtagattatatccgcaagtcattccgtgatacatggctgaagaatcagggagatccttcacgtatcgtttcattgatggataagatcaatccgaatgcattgctgatcggtttcggtcgtcgttttgctacttacaaacgtgcgcacctgctgtttactgatctggaacgtctttctaagattgtgaacaatcctgactatccggtacagttcctgtttacaggtaaggctcacccgcacgatggagcaggacaggggctgatcaaacgtattatcgaaatctcccgtcgtccggaattcctgggtaagatcatcttcctcgaaaactacgatatgcagttggcacgtcgtctggtttccggtgttgatatttggttgaatactccgactcgtccgttggaagcatccggtacatctggtgaaaaggctttgatgaacggtgttgtcaacttctctgtattagacggatggtggctggaaggttaccgtgaaggtgcaggttgggcgttgactgaaaaacgtacatatcagaatcaggaacatcaggatcagttggatgctgctactatctacagcattcttgaaacagaaatcctgccgttgtactatgctcgtaacaagaaaggctactcagaaggctggatcaaggtagtgaagaattctatcgctcagatcgctcctcactatacgatgaaacgccagttggacgactactacaataagttctacaataagttggcaaaacgtttccatatgctgtctgctaatgacaatgcaaaagcaaaagaaattgctgcatggaaagaagaagtcgttgccaagtgggattctatcgaaatcgtatcttgcgacaagctggaagatttgaaagccggtgatatcgaaagcggaaaagaatatactattacttacgtaatcgatgaaaaaggcttgaatgatgctatagggcttgaactggtaactacttatacaactgcggatggtaaacaacacgtttactctgtagaaccgttcagcgttatcaagaaagaaggcgacctttacacattccaggttaaacatagcctgtcaaatgccggtagcttcaaggtgtcttaccgtatgttcccgaagaatccggaacttccgcaccgtcaggacttctgctacgtgcgttggtttatctgatagcttgacgaagtagggaagtgacgcttccctgcttgacgtccctatataaaagaagcccctgcaattcgagcgatcgaaattgcaggggctatctttttatatctcaatgtaacggtgtggataagatcagtattttcggcaaaagtgcctgtacttggatcagatttacctactgcgttaacaggaataagataccttgtcggatgttgtgccatcctattggcacaactgtgccaacggcgtggcataactgtgccaatatggtggcacaagtgtgacaacggtatggcacaagtgttacttcattaggtgaagtctcttatcagcttcatttatttgactacttctgccaatttagcctgaagaccttctccatgaagaccacgggcaatgatagtaccgtcgccatcaatcagaacagtgtgaggaatgctgttcactgcataaagctgtgcgccttcactctgccagaactttaggtcagacatttgcggccaggtcatattcagttttttaatagactctttccatgcagcagcatcctgatcaagagatacaccgacgatttcgaagtttttgcctttgtactgagcgtaagcttctaccaggttaggcatttcacgacggcaaggaccacaccagctagcccagaagtctaccagtaccactttacctttacctgcgtaatcagacagtttcacagtttttccttccggagtctgcatttcgaagtcaatgaacttagtacctacggcagtcttcttttgtttttcagtctgttccttaacttttacgattgtttcgtcattttggaaattagccgggatttgttccagcaaagctgcattctcttcagtagagttattgtagaaagtctgtttgaacaagaatacacctaccgggttggtgatgtttttctgtacaccttctttgattactttatcatattcttcttccagccgggcaccttctttttgcttggcttctttctgctcgtcactcaaagaagaatctcccatcgcttcgtagatagcgttcatcttttggctgatatcattgatttgagttctgatagcttggtaagcgtcattgttggaagtaccggttgcagaatcattgtcctttgtcagtgcaatgtttattttaccgttttcaaggaagaaatcaatcatcagaggttctccgttcacttcgcaagtgacataacggtttactgcagaatcctgtgtgccttcgaaggtgaaagtacctttagagatgactgcggtatctagttttgtaagatttctgcctgttgcttcctgaaggtaaacagtgtcgccgtcagcagcgccttctactgtacctgtgataacgtatccggctttgtttccggtacaagctaccatacccaacgctgccgtcgcaataactaaataagttaactttttcatgcttttgtaaaattagtgaataaatatttatgcaaagatagattttttttctgtctggcatcgaaaaacactgttatattagattaacacgtaggtggaaatcgtagaaatgtgtacctttgcagcccaaacttttagtatgaatatgcaagaagacaaatccatcattgaggttagccatgtatcgaagttttttggcgacaaaacagctttggatgatgtaactctgaacgtgaaaaagggcgagtttgttacgattctcggaccttccggctgcggaaaaacaacattgttgcgtctcattgccggttttcagacagcttcggaaggcgaaatccgaatatcgggtaaggaaatcacacagactccaccccataaacgtccggtgaacacggtatttcagaaatatgccctgttcccgcatttgaatgtatacgacaatattgctttcggcctgaagctgaaaaagacgccgaaacagacaatcggcaagaaggtgaaagccgcattgaagatggttggtatgacggattacgagtatcgggatgtagattctctttccggtggccagcaacagcgtgtagctattgcccgtgccattgtcaatgagccggaagtgttgctgctcgacgaaccgttggctgcgctcgacctcaaaatgcgcaaggatatgcagatggaactgaaagaaatgcataaatctctgggcattacatttgtatacgtaactcatgatcaggaagaagccttgacattgagtgatacgattgtcgtgatgagcgaaggaaaaatccagcagatcggtacgccgattgatatctataatgagccgatcaattcatttgttgcggattttatcggagaaagtaatattctcaacggaacgatgattcatgataaactggtacgcttttgtggtacggagtttgaatgcgtggacgaaggtttcggtgaaaatactccggtggacgtagtcattcgtccggaagacctttatattttcccggtttcggagatggcgcaactgaccggtgtggtacagacttcgatcttcaaaggggtacactatgaaatgactgtgctttgtggcggatatgagttccttgttcaggattatcatcattttgaagtcggtgcggaagtggggctgctggtgaagccgtttgatattcatattatgaagaaagaacgtgtatgcaatacatttgaaggaaagttgcaggatgctactcatgtagagttcctgggctgtacgttcgaatgtgcttctgtggaagggctggaatccggtacggatgtcaaggtcgaagtagactttgataaagtgatcctgcaggataacgaagaagacggtacgctgacgggagaagtgaagttcatcctttataaaggtgatcattaccatctgactgtatggtctgactgggacgagaatgtgtttgtagatacgaacgatgtctgggatgacggagaccgtgtgggtattactatccctccggatgcgattcgtgtaattaaaataaccgattaacaggaaaggaagtgaataagaagtttatagtatttttgtcatcacgtaagagctggactcttccttacattattttctcggcgatctttgtggtcataccgttggttctaattgtcgtgtatgcgtttaccgatgataacggtcatctgacactcgccaattttcagaaattcttcgaacatcccgaagctatcaataccttcgtctattccataggtattgccattattacgactcttatctgtatcctgctgggatatcccgcagcctggatattaagcaacagcaagctgaaccgttccaaaacgatggtggtgctgtttattctgcccatgtgggtgaatattctggtgcgtactcttgccactgtcgctttattcgactttttcagcgttccgctgggagagggagcactgatcttcggtatggtttacaactttatccccttcatgatctatcccatctataatacattgcagaagatggaccatagctatattgaggcggcacaggatttgggggctaatcccgtacaggtctttttcaaggcagttttcccactttccatgccgggagtcatgagcggtatcatgatggtgtttatgccgaccatttcgacattcgccattgccgaactgctgacgatgaacaatatcaaactctttggtactaccattcaggagaatatcaataacagtatgtggaactatggggcagcactttcgctgatcatgctgctgctgatagccgcgacttcactgttcagtaccgatgataaggataatacgaacgaaggaggtgggctatggtaaagaagatattcgctcagacttacctgtgggtattgctgctgttgctatattcccctattgtgatcattgtgatttattcttttaccgaggcgaaggtattaggtaactggaccgggttttcgaccaaactttattcatcactgtttaatacaggtgcccatcattctctgatgaatgccctagttaataccattaccattgcgctgctggctgccacggcatctaccttgttgggcagcattgctgccatcggcatcttcaacttaaaagcacgctcgcgcaaggcgattggttttgtgaatagtattcctattctgaacggtgatatcataaccggtatatcgcttttccttttattcgtatctctcggaatcacgcagggatataccacagtggtactggcgcacatcactttttgtactccttacgtcgtattaagcgttctgccgcgcctgaaacaaatgaatccgaacatttatgaagctgccctcgatttgggagctacacctatgcaggctttgcggaaagtaatcattccggagattcgtccgggaatgatcagtggctttatgcttgcactgacactttcaatcgatgattttgccgtaactgtatttaccatcggtaatcaagggctggaaacgctttccacctatatctatgccgatgcccgcaagggaggtctgactcctgagctccgcccgttgtccgccattatttttgtggtggtactggctttactgatagtaattaattaccgtgccggaaaaacgaagaagaaagaatcatgaacatgtactgctacgtaaataaaatgaaaagaatagttgctgttaacttgtttttgctggtgctggctggttttctgagcggttgctacaattccggcgaaccacgcgagagagttcttaagatctataactgggcagattatataggagaaggtgtactcgaagatttccaggcgtactataaagaacagacaggtgaagatatacgcatcgtctatcagacattcgacatcaacgagatcatgttgacgaaaatagaaaagggacatgaggattttgatgtggtttgtccttcggaatatatcattgagagaatgctgaaaaagcatttgttgttgcctattgacaccactttcgcccattcccctaattacatgaataatgtgtcaccatttattcgcgaacagattaataaactgagtcagccgggtgaagaagcaagccgttacgctgtctgctatatgtgggggaccgcaggtattctttataaccgggcatacgttcccgattccgacgctttctcctgggaatgtctttgggataagaaatatgcaggaaagattctgatgaaagacagttaccgtgacgcttatggaacagccgttatctatgcccatgccaaagagctggaagaagggacggtgacggtggaagacctgatgaatgattactcgccacgtgctatggaggtagccgaaaagtatctgaaagctatgaaaccgaatattgccggttgggaagcggacttcggtaaggagatgatgacgaagaataaagcatggctgaatatgacctggagtggcgatgcgatatgggcgattgaagaggcgaatgcggtaggagtggaccttgactacgtggttccgaaagaaggaagtaatatctggtatgatggctgggtgattcctaaatatgcgaagaatccggtggctgccagctactttatcaactttatgtgccgtccggacattgcgttgcgtaatatggatttctgtggatatgtgagttctatcgctacatcggagattctggaagagaaagtggatacgactctggattattatgcggatttaagttatttctttggtccggatgccgacagcatacagattgacaagattcaatatcccgaccgtaaggtggtggaacgctgcgctatgattcgtgacttcggagataaaaccaaagaggtactggatatctggtcacgcatcaaaggtgacaatctgggggtaggtattactattctgatttttgttgtcgtagctttgatgagcggatggatgatttataagagatggcaacgctacagccgtcggaaacaacaaaatcgcagaagcagaagaaagagaaaaaagaatgtgaagcggtaagttaaaaacacccggtaataagcggtggatgataaacgaatgatacggttaaatccgggcatcgtttgtcatccaccgcttttttatcctgctcttttcatagaacggatgatgtctttcgtctctttatctacacgcagagattcaatgattttctgcaatgatttattgtatgtccagttatccagtttgctctgcttcagatatttcatcgtcttatccggaaatttaatgaaacagattgatatcatccatgccattgccatacgtgcataataggcttcatgagtgaataaatcggcatattctagcaatgaatcgatatgatcctcatctacataatgaaacagcatcacaattccgaaccggatttcatattcttcttttgacttcagataaggctggataaactgccatactgtttctttcccttttcctaccgctgtctttttcagctcacctgagaaaatatcgcatacggcccagttgttgatacgcgggacgaagaggcgaatatagtggattcgttcttccagctccattttagcgagtccgataatcattccctgtagcattgtctcttcataatactgtgtatcggttgcttcaacgaatgtccgccagtcttctttcttggcgagccctttagccattatccggagttgcgggatgcgtacaccgagaatattattggcaccgggaattaaagaggagtgaaattccctgtatgtagggtcttccaacgttttcagttctttacggacgctttctgttgttgtcattggctgtagatttattattgatgcaaatatatgaaaaagagtgcgtcttctttcgcagacacactctcttttacattttattctgtaaataattaaacagtcaccttatttcttggtcatatcaaaagtaaaggtagttgccggaaatttatcaaaccgttcttcatttactgtaacttctgttgcctgaatagcaaacttcagtttctgaccttcataagcataactgcctttttcgtcagccttgattgtcacttttacggtgagtttaggagtttcttcttccccttcagtttttcttatgggttgtggttccattgcaatttccaataccaagggttcaggtgacatttgaagtaagatattgtctttattgtcgttgaaagctgcttgataagggattttgtattctacatctcctaccgctttgatgatggcttcggctgcgtccggatcttcgataatgcttttgatcagatcctctaccgggaatttgctgattaatatatgattatcttttaattcggcatttacggtgactccgtcttcagcttcattctctgcattttccaaaggagcgatagaggttgtctgcattttgccggaataggtgccttctacatctttgagagaatataccggaatattttcatcatcatcactactacaagaggtaaagatactggtcatacccaatgccattgccaataaaacaaaacgacttaagcaacatacttttttcattttagttaaagttttcatacttgttaaacaaattaggttattaattctcaaaattaaggtgtacgtacatagagtaaataccggaaataacgaaatactgcatcatggaaataaaaaagtactccagtcactttctccgtgaagaccgtgctggagtacattcggacatgcttttagttgtccgttttattccgactattttttcttgatcgattctttaggtgtaattccgaagtattctttatacctgttgcggaagttttttacatccttcaatccgatcatttccggtatggttccgacagggtatttcccgctttctaacaactcgtgtgccttttccattcgaacggcttcaataaagacggtcggggcctcgccggtcactgacttccacttattgtagaatttcgttctgctcattttcaaatgtgaggcaatcgcatcgatagtcaaatcctctttctctattcgttcaagaatatactcttttacttcattgatcaataggcttttgcttccttcagtagcttccttgatcatttcggttggttgtacttgcagaaaatgttctccgaatactttgtgcaggaatgcttttctaagaaggcggctgttcctgataagaacagcaatctctatctttaaatcctccacatgaaaaggagtatgcatgaatgtgtctgctaatgacgcttcccttttactgcgttggtcggcatctatatgcgatccgtaaaggatgaccggtataatagatgtttctttagacgtcttcagccttgaagaaagttcatcaccgcccattccgttgagcactgtatcgcatattaccagatccggatgttcatctttgatgtatcccaatgcgtccgctccgttttcaaagcctctgactatgtattcctctgacaaacaggtctccagataggatctgaattcttcgttactgtcgaccataatcacgacaggtctggacgaatttcttttctgcgaacttttgtggaataaggcatcaatcttttcttcttctatattcttctctatatgaaccaaactgcgttcggatacattttcataagagggttttacaggaaaacgtaatgtgatcgtatgacatgaattattgattaatatttctccattgcatatttctgtcagttttttgcataaagcactttttgcaaagtaatatttaggttctgttttttgtttaataagatgtttaccggagcatttatagcatttgattaggttttcatttccagtataactcgcttttattatccaatatttgttgcataaagatgcgtgtataataactttttttgaatattctgtatgatctattatattctttatgaatttctctattacgggagatattttactttgatctatccacacgcttgcatatttgaattctgtttggatttctaatttaatatgtctgtttgctgtgtgatctttcagagaagatattttatttttaaggaaatttcctaattcatgttccgtaatattcattttttgggaatgagcggctatttgcttcaggtccattaatctggttaaatgatcattaaggcaatctatattgcgaatcgccagtgacagatcctttttgatattgtcagggcaattcttgttataggttgacttcaaaggcgtatgaagcaatgtgatcggggtgcgaatgtttcggaaggaatccatgaagtactgattttcttcttttaagaaagcaatttctttccgcatggcaaaagaatgagacaagaaccaatacaataaaagtattcctgctattgaaaataaaattggaaataattcactttgggtggttgtaactgcgataatagaagtgtataatgacgttataattaaatatttcatattaatctgtttttttagtaacgtcacttggtgaaattgatctattcctcttgttcgggtttgaagcaaggaaaaatgcacagtattatggtctcatgattgtatatcaataagttcaaataacatgatctcaaaattatttgttctttgaaggctgatatcgggaatgcgtagtatatatgtagagttttaattctaatgtttgaacccttttgaaaggaatagggcaaatctcctccaagtaacaataattaatttgattattttttattaaacataaatgttaaatatattgtaagtaatgcgggctgctccggaggtgcccgtgcttttggttgggtacttttggaataacttccatttagtaccaattcagattctctcatttttgggtttttggataatatatacgtatttttttataatataatattgcttgttcttatgaggtaaatatacgccatagttataaaaaattgatataatatctgattaaaaatagagacttgttactttttgtatgatgtttgcgataaaatgtattgaaaacttgtatatttttaatacaatgttatatttattgttcgtagaaaataataatgcttgcttatttaaggttctgcttattattaatttatgtttaataaaatcataattagatcaaaacagtcatggaattctttgtttttattcctgatttgggagattgatacgtagatttatagtatggttctatggagtatgcttaataaattggtataatgctatatatcttttcctatatttatcaggttggtttgaagcattctaccatatgaattaataaattctcgccagctattagctgtttgttgcttatgttttattctgttgcacttgtatagctacagggatgcataactgtagcagacttgttgcacaagtctgcctgtctgattactccactgtaactttattgtttctttatgattggatagggggaatgaaaaaaagtgcagttttctcctatgaaaaagtgaaaagtatatagatgatttttgtaaacttgtagaaaaaagaactgttttgtgggcttaaagtgttgattagtaatgctgtgacatttttgcttttccccttataataattagattagatacaaaaatgtcacagcattcatctgattatcctcggttgctacttctcttcttttcttgcccgtaactttccctccagttaattatatgagcgttagaagagtgagtagctcccgaaggatatattatctaataaatgttgtatgagtaattcttcacatgtttccttcattaaaaaggaacatgtgaagaaatacattactctctcactttaaactacttctccctctttcaacaaaagagggagaagtgtattttaatacttcatcaagtgtgatgctttaaagcctttgattaataattctttggataagaattaccgtcataagtacaagtagacttgaaagctccttttgcaacaccattcaatacgcttacaatgttgttggctctaaggtcatagtaaccaatagcaccaaaacctttatttgcaacttgtgttgcataaagttgggcactactagcagatggggtactgttaaggttgatggttaatggtgcccatttactgttcggcataccaaaatctgtaccccatgatggatagttgaagaatgcgtaaatgccataatcaatatagctattaactcctgtaagctcacttgtgtagccataattgaatacagtaatcgtcttacctggcattttgttatggagcgcagtaatcaaattagagaaagaacctgtacttccagatggataaccatttctaccgtattcagcccattcgtcgtcaaagtctacaccatctaatccatattgactaacagcattggcaacggcggtagcaaactgttcagtctgagctgaattcatgtttgcgaatccgagtcctgtatggtcacctaatagaccgagtaaaactttgatacctttgtcttgaagaggcttaatcagagtgtctttgtggtccaaaatgtactgtacatttggattgttatataaagtagcgtctgagcctacacctcttatgttggcagcgaacagaattacataatcgaaaaatggagcatcatccataatatatgaccctgcattaagaggattgatatcatttacttcaatataaacgatgtttttaatacctgtggccgaacgggtgactacttcagattgattattatctgattggtttactggcatttcttcttgtgagcatgcgcaaaatgcaaatatagcgatagatgacgctaaaattttatacaagtttttcataatgtaaattttaaaattgatttaatgatttttcttttcttataatcaatgcggaagacatgtctttggcattgataggatacgtgtttggtggaagttcctccttcatagtctgatttttatgcgtaaatattctgcatctcctttctcagtttgtccatattcacagatgctttataaatatgaatgttatatcttaataatctttaggcatgagaagatcatgaatgttgaggtattgattatttggagagttaatacctgttacaaaatattctttttccatatcacataagttacagatagcaccataagccatataagtcggtgcataagattccgttcctgcactaacatagtctactctatttactacaaatacatgatttattccagcggttatcattagtgagggttgagtaaacatttctatcacttgatctaaaatatttgcttgctcacttgacatatgtatatcagtatttaaagctccccatttttctttgtttaatcctgcaataggacgtgtccatttttcaggagtactccaaggatcaataattgtgttcaattgatcacaccaagcataatctaaaagttctcctaatttcaaattagcgtcattagtgatcccttccggagattcagaagtttgtgtataggttatgatcttgtttcctagcttatctcgtaaagatgctacgaatttgcatagattgtttgagtaattaatgttttcattactttcttcataggaaaaattagcatcatatagattgactccatctaaatgatatatatcaatcacttgttttattctttctacaaatatcatcatttctttttcccccagattggaaaaaccaattccttctcccgctcccttaatggcaaggcaaactttgtggtctaactgttgcaatggaacgatgtacttttcacgtttctttagtacgtatgccagatcatcttttagatataaggatggcaacagattatcgtctgccttgacggtagcgaactgtaggttgattatatcgaatggattgtagtaatctacttctggtgatgaaagagacatagactcaaaatagagtttgttgagcagtagaggattggtgaattcgggatctacccctgctatctgaatgaagtttttctttatagcgttatattcggcaggagccattccccatacattaattatataatataatgttttgcgttcactagacatggccggggaactattgttctcttccactgtcagagggagtacataaataacagaatcttctatggcttcatcatatttgaaggcaatagagacagagtttgactgctgttctcctttctctattgtcatttttccactgttacctaaatctacgtattctgtaggatacagagggtaactcgttccgtgcttcgaattgaagtccagtactttggattcgtctacttttacggtgtaatttcctgtctgtgaagccggttctgttaagctgatgtgaaattgatcgctcaaactggcatggtccatgtttatctgcgggttttccatcgcataattatcgctttgtaatatacccatagaaagacctatacctccggtttcggggaatgtaccggcatcgatagtaagatcgttattttcgcaggcagtcccaataaaacctgccgcaaatgccagaatcagtatatgtttcaatatttgtttcatattttgatttttataagtttctcatttctaatcttccctattcacttgcggaacttctatgccgcttggccatagttcctcattttttacgtcatattcttctttactattgaaatctttccaataacgaacaatgtgtgcatcgttatgatatttggagtaatccttgatatcattgccgcttccttcattgaatttccagtaagcagcgaggtgtgcttcattttccggatcttcaatgtcgtacatgtttttccagatttcctcttgtgtacgtgctacatcccagatacgtgcctcacagacattaccgttaagttgtcggtcgataagccagcggtcattataagaacgtcctatgtagaaaagccagtcaccgtcgcttgcaccgggaaaactttcctgtttgcggttggcaagttttatttcagagaactcgctgttgccatagttagtgcttcgactttgttcttttccattgacgtagaaaataattgttttggtggcaatgtcgtacgttagtgcgagatggtaccattcattttctttcagtaatttggctttgttggcttcggggaactttcctgccggagtctgtatctgcaactgttggcgtgggaagcctgcatcgcctgctcggaaacagaaatattgctcgatgcccatcagactggaaatgtctgtattggcttcgtcgaaattggatatacgggtgattatttcaaaggtgacagccttcaaattgttcagatgagcagcattgccggcaggctctgttccccatttgggtacatagaatccgggaacttcgacgtagcaatagcgtaagttaacagcggtagtgatggcgctggagcgtttcactatataccagtaggtggttgagccatccaataggcctacaccttgtgcggagttaagagacactgggcagagatatgctttatcaatctccaattctgtcaggttttcgaaataaatatgtaacggagcagaattgattttgcctgcgcgtattgtcatttcgttgctctccaatcggtaatgtttggtcggcaatatatcatagctggtattgtttcgtgagttgtaggcttctacttgtgaagggtcaactgttacgttgactgtaacatcagtaccggcaggatatgccagccgggctgtgaagctcttttcgcgctgaataatcgttttgttgaatgtcatagtctccgatgttttgctttcggctacacttaaatagacaccgttgtcgaagggggcgcttttactataatcggcattgtcgcaagcagtgacagcaagtaacaacatgaaaattgcgaatcgtattttttgctttttcatcttagattcctcctgtgtttattttaaaggtgaagggtttaaagtctgtatggcaccacgtgtctccttataagtgatgttagcgtgcgaatagtctgcagcgacattctgtatcattaagccgccgataggcccgcaatctattacctgtatggcgaagaaaggcacttgtgagacaagcccgtcattattgtccgtagtcattagctccggatcgccggtaatgagcagcttgtccgagggaatacctgcataatagatagcttcattaatcagaagatgtaactggctggcatttttagaggacgtagtattgagtacgtagcgggtgaatacatcccggttcgcttcgggaataaaaagtggattactttccagaaaaaagatttttccattttttgctaacggtgtaatcttgtcaagcagtaactgacgcatctcggctatacttgcattgactgttgcgttattaccaagtccgatgtcaccggtgtaggagattgaggctccgtcaagcccattgtcgttaatggcggataccatttgctctaaagcgggagccagaagtgttttgatttcttgtcccgaactttctgcgttctctttgatactgctcagattgaaactaaaaagaacctttgttgcaaaattagtctgcaatacaggaatgtcttccagatcggctgaattaagtgttaccgcattttccagaatgacggcatcaatgctatccggcatcgaacgaagaaagtctttttctccgtctccgctatgtccattgtcgaagcgtacacatacggcatagtgtttgcgacttttatagttgcgaacagcttgtgtgtagcgggcatatagttcagggttctgaccatcgggggtagttactccgtaatccacctgttccgtttcggtccaatcgtcacacgatgtccacagacagcctgcaccaatcgtgagagtaacgacagtaaggaaactgaatataaggtttttatttttcatattatcttagtttttaaagatttttacttgtttgctttacgatcccaccacacatgagtgccaccggtatctcctccttgattattactactttcctttatcaatacattaatggcattgttaaggtggaaagaattctgggtgtattcttcgttgggatacatgagtcggcgcatgccggcttcggtactgacattgcggcctttgttcacgacaacaggcaataatttgggatatccggtacgcctgtgttcactccatgattcaatgccgttggggaaaagtgcaatccacttttgggtaatgatacgttccagattctcttcgaatgcctgttctcccatttcattccattttactgtaatgttggcggggctacctgtgctatacgaacctagcgggtcagtatagccacttggagaagctattgaattcaggtagtcttctgctccgctggctccatgttcttcgaaagaaagcttaacacccgtttcgtagaaatctttggcttcaccgcccatattccatttgcgtaatgctccttcagctcgcaggaatgctacttcggaggcagtcatccatacatatggatcgctggcggtcatcaaacgattagagtacgatgttatcatgtcgtcatcagaaaatggtgaattaatgccgatacgcatgccgtaataaccttcctgatcgttattcttcaccttggtaaaatatttatcccgacgtgggtctgcataaccattcatgtaacagatgatatcggctcctatacgatagtctttccaatcgttgaagcagagtgctgagcgattttctgctacatggaataaggcattgtcgtcgttcttttcgatcactcctgccgctacggctttctcggcaatgctttgagcttcggtagccatatcggtgtagcataggcgcatagccatgcgtagttgtagtgaatggagaaaaagtcgccattgctgcagttttccgtagtagacatcatccagcttttcaaatccgctattgccttctgtcatgttgtcttcaagtgcctgatcggcttcttcaagttcttgaaacatacgcatgtagacatctttctgtgaatcgtaagccgcattcagtccatcgctttcagaaccttctccggatactaacactttgctataggggatagggccgtaaatgtccgtcacgcgttgcatgatagttactcgtagcagtttggctaatgcaagggctacaggggcatcttcatgttgtaaaacggcataatatttaggatatgtttctgatataacatctgtaaatggtgccttcaaccagtcggttttaggattataggtagagtatttctccagccatccggtacgtgtttcaccgaaatatcctgcataagaaccaccacacatggcttccatgaattggtaaagatgctcttgtgcaggtattactaagccttgcaggcctctgatagtggagccgaggtcgtagttttcacggccgatttcttcgctgtccacttcgtatttattacggttcatgtccgtatccatgcaacttcccaaaggcagaagcaggaaggctgaatatactgctatcagcatatatcgcaggtttttcataaatttcatggttttagaagttaaacttaacattaaacccgatgttgcgggtgctcggcatcatgaagtaatctatcccttgataatagttgctggtagtagcgactgattcgggatcgaaaggtgctttgcaataaatcatccagagattacgccctaccaaagacacgttgatatcacatatgtttttcaaccaacggcggggaatagtatatccgatatgtgcttcttgcaggcgaatattagtcgcgctgtaagtatagtattgcgggagtccgctggaactaccaattgtctcgtaccattgctgggcattgatcatagtgcgtccgttgataactacaccacctgcgtcgcgggcttttgcactggcttcagatactccgtattggtcgagagctgcttgcgtggcagaataaacgatacctcccaaccggcaggaaagcaggaagccggcagaaacacctttgtatgtgaactcgttactgaaagcaaagttggctttaggtaacacgcttcccaatttgatcggttctacgttggcatctttggccaaagcaccattggcgtccatctcaatataacctttgtcattacgtacaaggtcggctttagagtagaggtcgcccaaagttccgccttctttcaagatgaaacgtgaatagcccaagccattcatttcaagttcgggtatattgagtatcttgcctgtctcggggtgatggaagtcttttactaattcaataatcttgtttttattccatgagaaagtaaaattgctattccagccaaattcattccagcggtgtccgtagctcaacattccttccatacccatattgcgaacgtaacctgtttgaacgtagaatttggagtatccgaaggaagcggatattttggggtcgaaggtttggttataagtattggcatagtagaatgaagcacttaggcgaaggtctttgaagaaagtggcgtctaagccggcttcccatgaatccgtacgttccggataaagcttaccgataggataatgtgttttgggtagccatcctaatatcgtggtatcatatttataagttgggatagtcaggaatcgagggtagggcatacctacggaactgaatgatccgcgtactttcaaataatcaatccattcggggagcttgaccatttcgctgatcacgccggaaagtccgacggagggatagaagaaagaggtttgtgacgaacccagtaattgtgaagcccagtcgttacgtcctgttaaagtaagatagagcatactcttccatcccacttccgcacttgcaaatatggattgggtcatttcttcccatccttcttgtgtggcgcgtttctttgtgttatcaaggtcgaatacgttgaatacattaggtattcctttttcctgtatcggaccgttgtagcctagcatatcatagctgttgtcgcttaatgatgtaccaatattggctacgatagtgaagtcgcccactctcttgttaatatttacaagaaagtcagcgtacgtctggctgtttccactcttttctatgccgtagtatccttgttcgctaccttcggtaagtgtagtgatggtacttgcatagtatttttgctcatacgtgttgtttgaattatctatgcggatgcgtcctgataaacttagccagtcgagtacgtcgtaagttaatcctgcagagagcatataacgttttttactgttttcacgtagattacgataggctatccaataaggattttgcatgcggaggtcaccttcgcccgatggccagaactgttcgttgattttgcgagcttcgttgtagcgttcaaagaccttgactgtagagaaattatcaccacgcggataaaggtaagcaggaactaaaggattggaatactgtccctgattagtcatattacggtcgttttgcaggatgtagctggctcctacgtctagtttcatcttgtcattgaggaaacttgtagtgttgcggaaagtaaaattatatctgttatacctattgttgggaatcattccgtcggagttcagcgcagcggcagagaagaaagtctggttcttttccgtaccggtggataaagtgactgaattgttgtaaacagctcctgtttttagaaagtcgttgggggtgtagccaggactgtttcccatcttaggtccccagctccatacggtggaaccgtcagatttaccgttacttcctgtcccgtaacggttttgaaattcgggcattacgaatggtttcaaccagtcgatgccggtagaaacactggcctgtaatttccctattttccctttttttgtagtgacaataatagcgccattcgcagcattgctgccataaagggcggctgcggctgctcccgtaagaacggacagactttcgatgtcatccggattgaggtcggcaatgctttccgtctctccttttgaaccaaattctgtgctgccaccacctccgaagttatacataggtataccgtcgattacataaagtgcattattactcttttcgatggattttgtaccgcgcatcactactttgctggcaccgccgacaccggaagaactgctattgataatgacacccgctaccttaccactcaagctgttcacaaagttagcgtctttgattgttgtcaattggtcatttttgacttgctgcacattgtaactcaacgctttctgttcgcgtttgatacctagagcggtgactaccacttcgttcagttgtttagtatcacttgccaatcttatttcgtagatattcttatctgttatttttacagtttgaggtgtatatcccacgtaagtgaagcttaatgtgctgccttgaggagccattatattgaaattaccatcaatgtcggtgattgcaccttcagagcttccttctactttaatattcactccgatcagtggctcattattttcatcgattactattccacttactttttttgtaggagtttctttaagtttcttgtcgggaataatcatgatatacttatctttgaactgataagtaaatccacttccccgaaggatttgcgaaagggcatattcaagtgtcgctgcttttaggtcaagatttaaaacaggcttgtttttcagttgcgaatcattgtatccgacagaataatcggattgtttttctatttccttaagtgcctcgataacagatatatttttcttctgaatcgtgatcttggcactattttgtgcaaaggagggtgtttgcatcatcaacaaacagaaaaaaagtaaaaaacttcttccctttgcggtttgatctactataaattcataaatttgtagcattttcttagtattaggttattaactaaattatttcacggtaattgaatagagtaaaactctaatattgagaattttgatttcatatccgggatagagttagggctccgttccggatacttttttgcatgagtctttagtggttaaaaaggttattatattgttgtttttttactgtttttcttttgggatgatacccgttacttggggattaagtaacagcggtctccttttatcttatagtccatttgacctactacatttactatcacatccattacctcagatagtggtgcctggtctttaaacctgaaactgtatctgtcgtctttcagcgttttgagctgatactcgaatgtataaggatatttacgttcaaggattgtgatgatatctttgacggacatttctctgaacacaagttctccacgttgccaggcggtaacttctttcatgtccggatggtccaggctatggtaatgagtatttttgttataagccaactgctcattcggttttagaatcacctgcgattttaaatcattgtattctaccaatacgcttcctgaaatcaatgtggctgccaacaccggattttccggataagctgaaatgttgaactccgtacccaaagctgtcacctgaaaatcattggatttgacgatgaacggatgtttcttatccggtttgactttaaagttggcttcgccgattaaaaatacgctacggtttttcccggtaaagttttgcggatataaaagtgtactttgtgagttcagctgtacctgagttccatcgggtaaagtgagagtccttatttcagcagtaggaatatattgttgaataaggttctcttctgcatctttaccgatggtagaaaggtaaaccgaagatgcggccactataaagaaaaccgcagcgacagcctgccacatacgaatcggtcggattgttctttttcgttgtatgggaggtattccggcattctttttcaaaagttcataagactcctgcatatcggttgcggttccccgtttatgagcctcatcccataatttttgtaatgcttcgtctttttcggaagtatgctcttcatctaccagccacttgtagaagtcttgctgagtagattccggatagtcatttccggtgaataatgttattattttctgaaagtaattcttcatattgaggtattaatgttataactgttatattaatacttcaattaactaaggcagcttacttaagggagtagcagaaaaaatgcaaaaaagatgatttttttcatttcaagcagagttaagtagatatgatgttccactgttcgtctcgaaatatttagtttctcggctatttcaagattgctcatatgcttgaaacgactcatttcgaaaatcattctgcgttgttccgggagacgttcgagaactaatttgatgattagttgcgcctctttataatagatggggttgagtgtatcttctgattggaaaagttcgtcgatgagagttttttctataattttctcctgataagccaattctacttttttgtgtttgataaaattgagagttgtacttttagtaagagtatagatataaggagtcggattaggaacttctgcccataattcaggcttagtccatagtttagtgaaaacatcttgggtaatatccttcgcgtcttcttcggatttaagcagcattagggcgaaatatttcactactgaataatacttcgtgaatattgtttcgaattgttgcgctaaaagtctttcgtcttgatctggggtcatcgggttaacagattattgaaatcgaaagacaaatgtaaacaaattaaattaagatacgaagaaaaaaggaatagtttataaaaaagaaaaaagatagtgacaccatccggtccggatagtgtcactatatgagtgggatgctgacactatcgcaacaggatagtgtcactatcttaaagttagtttttaccagttccttttcactgtacggtagccataaccgatgattaccaggaaacaaatgaatggcaaaatgaatgatacattgacagccggcatggaagctatctctttcatgtcaataatgcttgcttgcaagggaggaagtatggaacctcccaaaatggccataatcagaccggctgccccgaacttggcatcgtctcccatacctttcaatgcaattccgtaaatggtagggaacatcaaagacatacaggcagaaactgctaccagacaatacagtccgaagatattctgaaggaagatcgttcctaatgtgaaaatgcctccgaagatggcaagaatcatgagcaacttccctgcattgagatagcgcagaatgaaagtacagataaagcggctgatacagaaaataaccatcgctacgatattgtattgctgggacagaacttccgcacttttttcatccatgccatattccggcgacataaacaggcgtgtaccatactgaatgataaaggtccagcacataatctgaacacccacatagaagaattgtgctattacaccttcccgatagcgtgtctgggtgaaaatacgttttagcgtaggaaagaaatctattttgtgattctgatctccattcttgggcatttttacaaatcgtatcagaagcagcatcgccagaataacgagtccgatagtgagataaggagctatcaatacggcaagatcgctttccttgatggcctgaaactcactgtcgttcagtaaagcgcgttcatcagtgcccatcgggtgcagtttagcctgaataaattgcatcgccacgtacattccgagcagcgatcccattggattgaaagactgggcgaggttcagacgtcttgtagctgtctcttccgttcccatagaaagtatataggggttgcaactggtttccagaaaggagagtccgcaggtcagaataaagtaagcgatcagaaacgggtaatactctcctgtcatcttggcgggaaagaataagaaggctccgaaagcatacaggccgagtcctaacaatactccggctttataagagaatttgcggatgaacatggcggcagggaaagccatggcaaaatatccaccgtaaaaggctacctgaaccagtgccccgtcggtagcgctcatccggaaaattttggagaatgcctttaccatcgggttggtaatatcgttcgcaaatccccacagtgcaaagcaggaggtaataagtatgaatggaataagatagctgacgccatcctttgagataatagactgcttagtgtgtttcatggtaatttcttgttattttaggtattatataaatggaacattctctccatgggtctccatttctcagcggaactcattcccggagcggcctgctggaggatggacatgtattcttcccattcttgttgccgggggagagtgttcagacgtgccatggctgtgtcccagtcaaagtcgacgggtgcttcgacgatcatgaacaaacgggtgccgagaatgtaaatttccatctcaaggataccaacttcatggattcctgcaaggatttcgggccaaacttctgcctggctgtgtcttttccgatattcagctattaactccggtgaatcccgtagatcaagagtctggcaatatcgcttgacagggacgttgtaggtttttacttgatagccagtttgaggtgtttccatatctttcttatttttcagggtaatatacttgtggtgtaacactgcggcttactatttctctgatttcccggaggctggatatttctcctttagccattgcctgagtcaggatattccccattgctgtggcttctactggtccggcataaacagggatgccgagtgcgttggcagtaagttggttgagcagtttattttgtgagcctcctccgataatgtttagccggtgaatcggagaggggagacaacgattgagctgtgctaccgcctcacgatatttggaggtcagtgactgtagtacgcatttgaccatttctgccttgtttccgggaactttaagtgaatgattccggcagtagttcagaagggctgtttccatattttcggggttcatgaactctgcatcgtccacgggaataatcgtgtcaatttctgcgtccgcagcttgcggaagaatcatatcataactttgttcttcgccacgtagcttccattcgctcatcaagcgttgcagaatccacagtccggtaatgttttgcaagaatcggatgtgaccgcctacgcctccttcattggtaaattgagccagtctcgcttcttccgtcaatatgggttcatccacttcgactcccaacaatgaccaggtgccggaactgagaaaggctacttgaccttcagttgccggaacggcagcaacggcactggctgtgtcatgcgagccgacagcgataatgtcgacggtgcctaatcctgtttcacggcctatctcttctttaagtgttcctctgacagttcccggcagaataatttctccgaataagtgttcggggagtcccaaagtacggatggtatccatcgaccagtttcgttggtgtgcatcgactagttcggaggtggaagctatgcaatattcattattggctactcccgtcaggtaatagctgaagaggtcgggcataaagagaagccgctgtgcaacttctagcagtacatcctgattctgttgcatgctgtaaagctgaaacagcgtattgataggcattacttgtatgcctgtgcaggcgtaatgcttttgtgcatccagtatttgaaataccttgtccggcattccgtctgttcgggcatcccgatagcagacagggttgcccagtaaatttccttttttgtcaatcaggccgaagtctactccccatgtatctatgccgattcctttgacatgatatcccttttgtgcagcaagtttcagtccggttttcatatcttcgaacagggcgggaaagtcccagtaaacatgattcccgagtttaacctgccggttggtaaagcggtgtatttcttctaattccagctttccctggagaagggagccggcgatgacccgaccgcttcctcctccaaagtctactgctaaatatgtgtttcttgtggtatctttcatggtattcccggatacttatttggttttctttcctaatacgtatatttccaggtcttctatttcttccggtgtcagtacggagtaatcaccgccggactgaactatgatgcggcaagccatttcgaagaaggtagcccgttcgtaaacttggtcgaagtcttttccgcatactacttgtccgtgattggtcagtaagacggaattatgtttcagcattgcttctactactgctttggctaattcgggagatcccggccggtagtaaggaatcacgggaatttccgacccgacatgacaaggtatttctgccgttacgttgaaatttgtcggtttgtttttcatgcaagagatggcagtggcatattccgactggaaatggagtactacatttacatccggccgttcgcggagaacgccaagatggaatgtgctttccatagatggttttacgccattcgtcggtgtaccgctggctatattacagatagaaactttttctttggcaagggtagggacccatgaacctgtacccgaaatcagtgcttcttctccgattctccaggaaagattaccgctgctgcaaagcattaattttgcgtctccgtagcggtgtgcctgtgccagaaacagttcgatgtgttcgtcagttatcatagtgtttttatttaagccgtcatatagtggaagcttgtgtttgaagactgcttccactatgatacggcaaagttaaattattaaatcaaataggacgaaagattcttgtttatttatagataggaccgtaagttgtacaagctctgtaatctgctccttctttgtccataccgaatgcgttccatgcagccggacggaaaatttcgttttcatctacattgtgcatgcaaacagggatacgaagcatagaggcaagcgtaatcaggtcttgtccgatgtgaccgtagctgatggctccgtggttagcgccccagttgttcattacagaatatacatccttgaaagcggatttgtcacacagacgaggaacgaaccacgtagtcggccatgtcgggtcggtacgcatattcagtttctgatggatttccggatcaatctcaacggtccatccttctgcaatttgcaggacagggcccaagcctttgatcaggttcagacgcatcatagtaacaggcattccaccttttgaaaggaagttggacgagaagccgccgccacggaagtaatcgcggtctgccggataccaggtcgttgctttgaggcagttttctacgtctgcatcagtcaggttccatggttctttcatgacaggatttccttctgcgtctaatgactggccggaaccgtcgagtgttgttgcaccggagttgatcaggtggatgataccgttagctgccaagccggtcagttctttaccggtaacacgttttacggcttcagggctccagtacgtacgtacatcagagaatatttgtgcacggttggtcagcaagtgtccgaacagcatggctactccgttgcaggcatcgttttcggtagccactacgaatgcttcacgaataccgttccagtcgaaagaagtattgagcagtgcttccggatagtcaccgttaggataaaagtctgtccattggcgttgtccctggaagccggcagcgatggcattatgtcccaaagcttcttccttgaatcccatttctttcagtttcgggtttccggtcatcaagtcacgcatgattatcatcatcttcacgacaaattcccagtcagcatctttttgttcgcggtttttgcgtttctccggacggttcttgaagtcgtcgccctcattcactttacagtatttttcagtccatgccattgcttttgcatattcttcgtggtcatagatgccttcttccatgcggcggatgatttctgtcaggtcaattgactcattgcgcattcccagatattcctggaagaagtcggggttgacgatagagccggcgatacccattgatacactgcccattgacagataagatttgcctctcatcgtcgctactgcctgtgcagcacgtgcaaaacgaagaattttctctgctacgtcttcagggattgtattatcgtcgaggtcttgtacgtcgcgtccgtagataccgaatgcgggaagtcctttttgtgcgtgtcctgccaatacggctgcaaggtatactgctcccggacgttcggttccgttgaagccccagacagctttcggataatgaggattcatatccattgtttccgcaccatagcaccagcaggaagtaacggtgatagtggaccctacgccttctctttcgaatttctctgcacaagcagcgctttcggctacacgaccgattgtactgtcggcaattacacactctacaggacttccgtcgccgtttttcagattattgctgattaactcagctactgctttggcaagattcattgtcttttcttcaaggctttcacgaacgccgccctggcgaccgtcgatagtgggacgaatcccgattttcggatactttttcatggtttctaaatttttatttggtgattgaattctgtgctgaactgtgctgtcaatacggcaaaaaaattacagggactttcggagtcttacttcagtaggcaggtacttttgtatcgggacattattcaggacaaagtttgccgcttcatttcccatcatctcccaatcaatactcaatgaagtaattccttcgtcgatcacttcgtaggaaggaatatcattgtatgccaacagaccgaaatctcttccgcattttagtccttccagtcttccttgtttcacaaccttcactacatcttgttgcttgatggctatgtagactactcctttgcgtacggtcagattctcgatatcttcctgaatttcgtataaaaatccttgttcctcacaaaaacgggtaaaatactctttactgctttggggatgcttcagatttttagagaataacagaacaagttgtgggtagtgccgtagtttctccttcagcatgagtaatgcctgatagaaagcttcatcaaaatcctgacagatataagaatacttttctttctcgaatttaccgaagtcaagaagcaataattttgttggatgaatcttattgagaaccatactgaatttctcattatcgaaattcatcactatgtatttattatattttccgacagattcgcggataatggtattgaaaagccgttcattatattgatgaaacagcaagtctactttgtaattaataggcagatgtttgacgaaactattgtaaagggcttctttaaaaggagtgtactggtcgagcaggagcaggacattggtcacctgactggttacataatatccttttcccggagtggaatcgatcagtccccgttcgcgcaaatcaagaaaggccttgaaaacggtatcgcgtgatactccatattctgcacttaactgattgatggaaggcaaagaatctccttcacgaaattttttcatggaaatcgcctggcttaatgtatccgctaattgcgtaaccttgctggactgttgaccgaatgttttctttttatcagttcgtctcatactgttataagataaatgactgtgctgagctatgctgttgcaaagaaaagaaatttattcagaagtagagaactattttaatatgttctatagcaggaaataaaaaaatccccttcggcgaaccgaagaggatttatagctttttccaaatgtcttgttaggaacctgccgaaatttattcagcagcagcttctgttgcagcagcttcttcagccggagcttcagttgcttcttctgcaggtgcttcagcagcagctttttcagcagcttcagcagctttcttttcagcgagtgcttttgctttcacttcgttgatcttcttttctgcttccagacgtgctttagcttcagctttcttttcttcgtcttgtttagctttcaaagcagccagacctgactgtttgttgttcttccaagcttcgaatttagcttctgcttctgcttctccgaatgcgccttttgcaacaccgccaagaagatgtttcttcatgtaaacaccttcacgagaaaggatattacgtacagtgtcacttggttgtgcacctttcagtacccatgccaatgcagcgtcgaaattcaaatctactgtagcaggattggtgttcgggttgtaagtaccaatcttctcaataaatttaccatcacgtggtgctctgctgtctgcaattacaattgaataaaacgcgtaacttttacgtccgtgtctttgcaatctgattctagttgccatttttaataattgtttttaattaatgatttgaattatgctactaactcgtaatagcgggcgcaaagatacagcttttcttttgattgacaaatatttcctttctttttcttatgaatacctcctcggatatcggaacaggatagcgagcagggcacagatccccatcgtaaacggataatagagattgccgatgatactgataggagagatgttggctaaccctgcagcaatcagcatttgtgctccatagggtatgataccttgtatcagacaggagaatgtatccagaatactggctgtttttctccggtcgagatggaatctctttgcaatatcctttgcaataggtcctgtggtgatgatggcaatcgtattgttggcagtgcataggttggcgatacttaccagagcggcgatgctcagttccgcaccacgcttgctgttgacatgacgggtcagttttttgatgatgaaattgatacctccgttataacggattgtttcgagcataccgcctgccagtaatgtgatgatgatcaattcacccatgcctgtgatacccgtacccattgccccaaaccaatcgaatacgccaaaacttccggtagctatgccgatgataccgctggtcaggataccaattattaataccagcatcacgttcattccggcaatggctgttcccagtactattatataaggtatgacttttatccattcaatagtctgtacttgtgcgggcgcagtgatggatagtccttgaaaaatgtagattcccagtacgataatcgctgccggaaccacaatcatagaatttacccgaaacttatcacgcatcacgcattcctgagttttggttgaggcaatggtcgtatcggatataaacgacaggttatctccaaagaaagaacctccgacaacgactgctaccataaacggaagggcgatttctgtcttttcggccaggctgacagcaacgggagtaagggctacaattgtccctacgctggttccgatggataatgagataaaacaggcggcaatgaatatcccggccaatagcagattatcagggaggatatgcagtgtcagattgacggttgcatcaatagctcccatctgcctggcgctttgtgcgaaagctccggcaaggatgaatatccatatcatcagaaggatattcttgttggcggctcctacggagaactggtagatacgctggtcgagcttcaatcctcgcgtaatggcaattgcgtaacaggaagacacgaggaaagccacagtgatgggtactttataaaagtcattaacaagaatggaagttaccagataaaggctgagaaagacgagtaacggactcaatgcccaccagctgccatgacgttctttatgtattttttcttcagtcataaattgatattgtggtatatattcgaactgcaaagatagtaaggaaacacataagtacgataaaaggctcagattttcatcttttctttttccgtttcatcttttctttttccgcttcggaaattaaattcccgttcttttttcttctttccgctactttcgtgccgttgacaacgtaactaatgtagaatagaatgacaacgactaatttttcattgtgtattttttgtctttgcctgctcacatcgtgtagtaagggtgagaagaaaacaaacgagcttgtacgggtaaaagtggcggaagtggaaatactggttccttctgccgagcgtgaattttcgtttattgccaaaccattcaaggagaccgaactctcttttcgggtgggcggaccgattgaccgtttcgaagtgtatgcgggtaattactatcatcggggagatatcatagctgaaatcgattcccgtgattttcgtattcgtaaggaacgtgcggaagctgtttatcatcaggcaaaagcagaatttgagcgaatcaaagtgttgtatgagaaaaacaacctgtccgccagtgcctatgaaaaagcacgtgcagactatacttctgccaaaactgcttatgaaacagctgtaaatgaacttgaagatacgaaacttattgctccttttgacggatatataggggaagtctacattgaaaaatatcaggatgtgaaagcgactcagtctgtcgtctcttttatcgatatcactcagttgaagatagaagcgtatgttactcaggagatcgcatttcaagcgaaggaaatcaaggaagtgggtattcgttttgatgttcgtcccgaagcagtatatccggctaaagtgatagaggtttcaaagagtacgacgcgcaataatctttctttcctgatgacggcattgctgcccaacaaacaaggagaatggccagccggtatctcaggaaaaatgttgttggaccttcctgctacatcatctgttcctatggtgactgttccgcaaacggcccttaatcatcgtcccactgaaggagactatgtatggatggtggatcaaacgacaggacaagtcgtgaagagaaaagtcgttttaggcgaattgctttccaatggaaaagtagaagtgaaaggcggattgcaggcaggagataaagtagcggtaagcaaattacgttttctttcggacggaatgcctgtcgatatcatttctcagaaagaaaaaaggacggttgccgctcaaaagtaagtagaagaatatgaagttggtaaaatatttcttgcagaagaagtcggtgactgttctgctgttgatattagtgctgggaggaggattgttttcttatatcaagatgggaaaactggaagatgccccgtttactattaagcaagcattggtgatgactccatatccgggtgcttccccttccgaagtacaatctcaggtgacggatgtattggaggaatcgatacagtcattaggcgaattatattatctgaaaactgaaaatcgggcaggcttatccaagatcacggtgtatgtaaagaaagaaatccgggcggatgagatgcagcagttgtgggataaacttcgtcggaaggtcaatgatgtacagtcgaaacttcctgcaggagccggtccttcagtggtgaatgatgatttcggtgatgtgctgggtgttttctatggtctgacgggtgaaggatattcatatcgggaactggaaaatcaggcgaagcttatcaagaatgtactgctcagggtgaaggatgtggcaaaagtggagatttatggtgtacagtctccaacgattgacgtcattcttaatccttccgttatggcacggagtggaatcacgactacggatatttcacgtgccttcgatgcacagaacagggtagtggatgccggaggaattgatgccggcgtaaacagaatacggattgaatctaccggtaatttttattctctggatgatattcggaatatgactatcgtatcacgtacaggagagcatttccggctggctgatattgcagagattgaagagagttatcagacgcctccaagtaacaaaatgcggattgacgggaaacctgcggtaggtattgctatttctacgatactcacaggaaatgttgtcgatatggcagaggcggtaaaacaggagattgaccattttgcagagaccatgcccgaaggttttgagctgcagacgatttatgatcagggttatgaatcggcggtggccaatcagggatttattctgaacctgattatatctgttgtaacggtagtagctattctgttgttttttataggattcaagaatggtattctgattggcagcggattggtgttttccatctttgcgactttgattgtgatgctttcacagggaattgccttgcaacgtatgtcacttgctgccattatcatagctatgggaatgttggtagataatgccattgtggtctccgattcggcattggtcaatatgcagcggggaatgcggaaacgggtagccatattgcgggcttgttcttcaacttcgttgcccttattggcggcgacagtcattgcgattctaacttttttacctatatattattcgccgcatattaccggcgagttattgtcatccttagttgtagttatcggcgtttcgctgatgttcagttgggtctttgcgctgacgcagactcctttctttattcaggagtttgtccgtcggccaagacccaacgaacttaaggcggctctttttgcaggcaagtattatgataaatttcgttctgcattgagatgggtgattcgtcaccggtatgcaacgattgggtgtatggtcattatgctggtattgtcggcatggagtttcaagttcattccgaaggtctttgtccccgcattggataagcagtattttacattggatatgtggctgcccgaagggacacggattgaagaaacagataagatggtgatggatatggcagagtatatccgcggacaggaagaaacggaaatggtatctacttatgtaggacggactccgccgcgttattacttgtcaaacgtttcctttggacctcaatccaactatgcacaaattttggtgaaatgcaagacttcgaaactttcccgtcagttgcatgcccgtttgcaggactctgtttcgttgaagtttcccgaaccgttgattaaagtaaataaattcgagctaagtccgttaacggaagcggtgatcgaggctcgtttcctcggaccggaccctgctgtacttgattctttggtagggcaggccattgagattatgcgacaaaatcctaaagttgcggatgcccggaacgaatgggggaatatgtcgatggttatccgtccggtatatgatccggtgaaggccggagcattaggaattacaaaagcttcgatgatggaatcggtaaaatcaattaatgatggtttgcctgtcggtgtctatcgggataatgagaaaaaagttcctgttcttttgaaatcgggtaatgtggatatagcggacacccattctttgggagacttttcgatatggaatggagaaaggtcggctccgctttcgcaggtaacagaacggatagagacaacctgggagtttccccaggtgagaacttataaccgtcagctgtcaatggctgcaatgtgtggcgtgaaaccggggcatacgatggcggaagtacatggagaaatccggaaagaaatagagaacatccagcttcctgaaggatatactttcttttgggatgcccagtataaagatcagggtgaggcgatgcaggccattgctaaatatttcccattggcattccttgcattagtggttatcctggtagggctgttcggtaatttccgtgaaccgattattattctttgtgtcttgcctttgtctttgataggtattgcggtggggatgctcttgaccggttttgacttcggtttctttccgatagccggttggctggggttgcttggaatgatcatcaagaatgtgattgtactgattgatgaaatcaatgtgcagcatcgtagtggaattgatctgtatacctctattgttgaggctacggtttcccgaacccgtccggtattgatggcggcaaccactaccatcttcggtatggtcccgctattgtttgatgtcgctttcggcggaatggctgcgactattattttcggactgacgtttgccacgggattgaccttgtttgtcacgcctgcattatattcaatgttttataaagtaaaaggaaaataaagatgaaaataaggatatatagcttgttgttatgtggttttgctttagggtctttgtctgctttagcccagcaaagtcctcttcttgaaaagtaccggactatggcattggattacaatcacgacttgaaagcggctgagaagaatatagctgccagtatggaagtggaaaaatcggcacgggcagatttgaaaccgaaactttccggaacagctaactttcagtatacggagaatccgttggaattgactctggatgtcccttctttaggattatcaagaacagtggaagggaaacaactgaactatggtggttctctttccattctgcaaccggtctatacaggcggacgagtactggaatccatccgtatggcacaacatcagcaatcatttgctgccaatcaggcaaaggcattgaatgatgctgtttgctatcaaacggatattcaatactggagtgccgtagcccggcaggagattgtgactgttgccgaagattttcgtaactcaatagccgctttggttaaaacaattaaagaaagggtagaggtggggctggttgatccgcaggatttactgatggcggaagtaaaactgaacgaagcggagtaccagttgctccaggcacaaagtaattttgaaacagggcggatggcattgaattctatgattggtgtccggctggaacatcatacggaactggattcacagataccggtggtggttgtcgatgattctacatggttgtctaccggtatggcacgtcctgaaattcagatggcttatgaccggattcgtatggccgagagtacgaaaaagttgaatgattcgcagttcaaacctcagttttatgtgggaatagacgggagttactcttctcccggatataatttcaagaaagatctggatcccaattatgctgtttatgcaaaggtctctgtacctatttttgaatggggaaagcgtaaaagtgagaaacgtgcttcttcttttcgggtaggtatggcagaagataatctgaataaagtgatggatcaggttgaactggaaataggtgtggcacgtaaagccctgtcacaagcaatggaacgggttcgtttgagcgaaagttcactggcgaaggcagaagagaatgaagcgaaagcaatagaacgttataatgaaggaaaagtgtcagtggtggaagtgattgacgcgcaaacctatcggcagacatcgcaggtgaattatgtacaagccaaagctgcggcacaaggacactattcggagttaataaaagcgctccacggatatgattgtcgataaaaagcactaactttgtatgaaaagagccaactgtatgaatgtaaagttgaacaccttattgtatatagcgctgttttcaggattgggtatattctctttcctgttactgataaattatgcaaccttctctgatcgggttgccgatatgctacattcagtcagtacactggggttcttcatactggcttttaatgtgctgggatatactaccatcaggctgagttcatggattgataatcagtatgcgttgaatctgcatcggcgttggaagctggtttcagtctatattatcgtaatggggatgtttcttttgctgaactacggtttaatggtaactgccaagttgttggcaggagcttcttatccgtttacgtttcccaacggaggctggcggattcttataactgtatggctggtagagctcgtcatccttggattgttgctggccaatcgttccatgcgtaatacgttaagattacaacagaaagcggctgccttgcaaaaagagaataatacggcacgctatacagctctacagaatcagttgaatcctcatttcttgtttaacagtctgaataccttgatttctgagattcgctacaatccggctaatgcggaattgttcacccagcatctttcggatgtgtatcgctatattcttcagtgtcagaatcaaaggttgacaacattgcgggaggaactggattttctgaattcttatatttttctgcatagggttcgtttgggcgattgcattcatattgacaaccgtattccgaagacttgtatggaggctcagttgcctccgcttactattcaattgttagcggagaatgtaatcaaacataatgtcattcatacgggaaaaccgatgactatcgaacttctttatatggaaaaggaacgggaactgatcgtcagaaaccggatacaaactaaaaaaacagtggtaacttccggaatgggacttaagaacctttctgcccgatatatgttgttgtgcaaccgtgacattgtggtagaaaatgaccggaaagagtttaccgtaaaaatacctttgctctatgaataagataaaagcagccatcatagaagatgaaattccggcagcccgtctgctgagggatacgttattgtctcttcgtcccgattgggaggtacagttattgcccggtaatattgaagaggtagtagagtggttcgggcagcatcctcatccggatatcctgtttctggatattcagctaacggatggcaattcttttctttttatagaacaggcgcatccggagagtatgattgtatttactactgcttatgacgaatatgctgtgcgtgctttctcagtgaatagcattgactatcttttgaagccgattcatgaagaccgcctgatgcagaccattcaacgttttgaaggattgacaaagaactacatccatgatttcaatcaggaaagccggatgctggaaatattgcagcaactttctgctgcgcaggagacctctgtctctgtgcagaaaaagtatcgtactcgtttccttatttctagtggcgagaaactattcaccttacaggtgagtgatatcgcttacttttattcggaaaataagctcacctttgccgtaacccataagaatcgtgagtatctcattgatctggcactagaccgattgagtgaacaactcgatccggatcactttttccggacgaatcgtcagacattagtctgtattgatgccattcagcgtattgaatcctatttcttaggaaaggcaatcgttcatgtacaaccacctttcaaagataagataatgataagtaaagacaagatggcttcattcagaatgtggctgaattattagctgttttgttatcttccaaaagggaattgatttcccctatagcaatacaatacgtttttgcatgatatctgtcagttgcgccttcaactgacgggcattgataggtttcggcatatacccgtcaaaaccactttccatcacccgttgctcgtctgaagcatatgcaaaagccgtaatggcgataatcggtactttggcagagtacttgcggatttctttggttgcttcatatccatccaggacaggcatattgatatccattaatataatttgtggattatgctccttgaacatgtttacagcttcctgaccatcccaggcatgaagcagatgataatcatattttagaatagattcgaacaacttataattgctttcattatcttcagcaatcaaaattaccagcttatccttttctatggcaataggttgtatgtcctttggaaggctcttcttaacagtctctgcttgcttgtaaggcaaagtgaaccagaatgtagagccgtttccttcttctgattctaccccgattttacctcccatgtgttcgacaagtgtctggcagattgagagtcctaaacccgtaccttgtgcaaatgaatttaatttgacgaaacgtccaaaaatacttttttgcttatcttgaggaatgccgcaacctgtatcagccacatagaaatataattcattgttctgacgtttgtatccaaatcggatactaccttgaatggtgaattttatggcattcgtcaccaggttaataattaactgagataacctgttcttttctatatgtgcgaaacatggttcttcaggagctacgaattccagtttgacagcatccgacttaagtttcagttgacacatgttttccaggtctttcattaaatcattgatttcaacattggaatagtgcaggtccaatgttcctgcttctatttttgataaatcaaggatatcactgatgagctgcaataataacgtattattgttttcaatgatactgacatattcttgtttttcctcttcttcttcggtggatgccaatataccggagaaaccgacgatagcatttagaggagtacgaatttcatgactcatgttggcaaggaaagcagacttcagccgattggactcttcggcacggtttttggcattaatcagttccatctccattttttttcgttcagtgataacgagtgaggagccaacaagagtcaatgggttgccattttcgtcccgcgtttcaacggctgcttgggcttccacccattctatcctatgaaatcctttttgtgtgctgactacgcgatattcttcttttactttttccgaatgaccgtctattaagttctgataagcttgttctacccgtttccggtcttccttaaatatcttggaaaaatagtgatagtcgggtactgccagttgttcttcggcaacgtcttttccttgtgtgctaagttctatcggtttgttgatgtcgcataaaattgttttacttcgcaaatcccatttccatggcacgatattagctacgtcaagtgacatggcgagtttgttgttgatagtgcttagcttttgttgtgccttatggagctctgtgctgttcaggcaaaatacatcaatcatattattttgccggtttgctttaagtactatatcgtagaaggtatctatttttttgaaatagtaggggaatgttattactttattttctgataaggctatttgagtgaagtgcaggaagtccggcattgattccggaaatatttcactcgcttttttcccgacaacttcttctttgcggaaaaagtttttctcaaaatgcgcattcacattgcggtaaatcagttctacgggaatgccatttttatcagcaagcacttcttcctgcatatagagaatgggcatgttattaaccagattcttataatttgtcattgcgtcaatttctttttgctgtgcttttttgatgctattcaggctatggatacgataaaagaatacgattgccagtaatatcataaaagacaaggtacccataatgaaatatttgttctgtttccagaatccaagcggtttattcagaaaatgtgtgtttggaggacacatggaaggagagaatcctttacggagtaatatcgtatagttgataataggtgcgccatctgatggcatataaaagggaatttctctagccggctttcctgtaagtatttctgaaatggtatgaattaattgctggttatagtgtttttggtcataagtataaccacctatcatgccaccgttttcttctgttatatcagccatattaagggtgaaaattggagctgtagttgttacgataagtttgtgagcattggtaactaatgaagtattacctgcaaatgtcgttttgtagaaccaggaagcaaataaaattccggttgtattcggatcaacatgatacaatgaatccaataattggttcgttgtcattttttgtggcgtgatgtactggtattcaatattaggatttatggcttttaactttgtctgtatttccaaattattggtctgattgatttctcgctcgtcaccgataaatatgaatttcttcatatcagggattatgtgagaaatcagttggatattttcccgtaaataaaggtttgaatataaaagtaccagattgtagggatcggcaagttgggagatcggaacacgctccgcttgtgtaactggctgtttgtagatgtaggtgtctttaggacctataaacttttcttccgaacagagtacaataggaatgtctccccaaagctctctatattcatcacgtagtaatagagaagggtttcccaataatattagcagccgtgggcgatgatgctcgtatttctgagagatcatattcttgaattctcctaaaatcgtatcgttatcgatcattaaagtattcatatgttccgcatataatgccagttttgggttcttttgaacgtactccgatacggttgaaatcatcctgttactccaaggagaagattctgcataggaattgatgcataaaatatagtttgaaatatctatgtggtctctttgtgctaaaataggagtaatagatatgaaacatagaaaaaatgctagcacatattttttcatattcatgagagtatgatgtttgtgttcgatatattatttattgatttgatacgggcaaaagtactaaaaacaatctgaaaaacgatggcatccaattaaaaaataataaagtagatgtattgttcaaggaatttcgaatccgaccttatgcggatgtgtaaaccaaaaatatgtaggtgtacgaaaaaggatacacttgtttttatcaataattggcctattgttgtctgtttttattaatgaatgaagctgcaatatttgcttgttaaaagcagaatgcgtaaattgttgattatgaatgttgtatgggcgactgttttttcctttaaaaccaacggctcgttggttttaaaggaaggacccgttgcacaccgaggaacgggccgttggttttaaaggaaagaatgagtttattattcaattgtatgaacaattctttttgtgtgtggatttattcctttctatactttccggcattatttcaatgcttctatgactttcggcaacattgtccagatcgtattctcatcttgtgcagtaaagaagttgccatctatctcagatttttcatccgtggcaattccgttttgaatggcaggtttggccagcggatggacagcgacttttttaccttttgttatacctgtaaagtcaaacatcattgcaccggcacagtgtccgatcatcatctttcctttttctccgaaagtcttgatgacttccatcaagtccacattgtatggctggtttgcatactgctggaatacaggtactgcatctccacaggagaatacaagtgcatcaaattcgtcttcatgcccttttagattagcaatcacatcatctactattaggaccattcctgaattggttttgatctctttcgtatccgatacggcaaatactttataggaaatgccattttcgaaaaaggcttccaagtattggaataaaccacaaccatttaccggattcactgctaaaactgctactttctttgccataatcataattatttaaatgaaacaatagttatttttagtaagtttattacttttgtgatgcaaatgtatctaccttaattgaaaaatacaagaacgaacctcagaataaggtagttacatggaagtaactattgttgaaactcagtataatacaaaacgttaaaaagatgaaaaactttcacccgacagggaattgccctgtaagagatgtcataagccgcttgggagacaaatggtcgatgctggtactgataactttgaatgcgaatggtacgatgcgttttagcgatattcataaaacgatagaggatatttcacagcggatgctgactgttactcttcgtacgctcgaatctgacggtttgattgaacggaaaatatatgcggaagtacctccccgtgtagagtattatctaacagatacaggaggaactttgattccgcatattgaaggattagtaggctgggctttggaaaatatggatacgattctggagcatagaaaaagtaactgactggattatgaataaagtagtggatactgttctacaaagtattcactattttatttcattccatttcggcggagttgtatttaatagattgcgcacgaagaagtcgtagcgtttatgttcaccgaaactttctcccatagtgtggtgagcaccgggaataaccactaactcaaaatctttattggctttgatcaacgcatttgctacctgcatggtagaagccggatctacgttatcatccatttcacctactaccagcattaacgggcgactgagcaagtgagcattctcaacattcgatccttctttatattgttcaccaaccggataacccagccattgttcattccaccatatcttatccatacgattgtcatggcagccacaggcagaatatgctgctttataaaattcgggatgaaacagtactgctgtcattgattcctgtccacctgcggaacaaccataaattccgacacgatctatgtccatataagggtacttttgggcagcggattttatccaggcaatatgatcgggcaatccggcatctttcagattcttgtaacatacgttttcgaaagtgcgtgaacggaaagaagttcccatcccatctaccatgacaacaataaaaccgagttcggcaataccactcataaagtagttataaggaataaaggttttgggtacgtattgattacccggtccttgatagatatactccaaaacggggtattttttgtcaggatcaaaattgctgggacgaatgatgattccccacatatccgtttttccgtcacgacctttggcggtgaatacttcgggagctttccagccttcagcttccagacgactgatatcagccgtttcaagtggcatgatgacttttccgtttttggcatcccggagtacggctacaggagctttgtctaccatagaatatacatcaactaaatattgcatatcttttgagaaccatgcattatgcattccttctgccggagtgagacaagtgagattcttaccgtcgaagccgatacgataataacggatcaggtagggatcttctttagcttgtacgccatttgccgagaaataaataagttggttggtttcatctacccggaggatatcacgtacgtaccattcgcctttggttatctgacgaataggctgggctgtagtacggtcatacatatacaggtgattccagttgtcacgttcactcatccatatcattcgttttccattttgtaaatcatgtcggaaacgacgggaataattaacgtatttgtcgcttgtctcttctattaacgggcgtacctttcctgttgcggcagaaaattccaatacccggtagacctgatgtccgcgctgattgtattcgaaagtgatggcttgactgtcgctgttccattcgggggccgtaatgtaatattgttgagagaataaatctgtcgatggaatcacactgtgtcctgtttccacatcgtatatgcagggtatcttaaacggaagttcatcgcccggtttggcatactcttgtttgtggagtttgggttgaagctgatcgcttggggaggattccacataatatacatagcgtttttctaccggacgaatcttgcaggaagcgacttttttgctgtcgggagaccagcggatataggctgagtaataatttcccaaagtaccgtccagacttagctgtttttcttttccggtagctgtttcttttacatatatattatgattcttaatgaatgctgtatatttcttgtcaggagaggtgacgggagcagccgtcttttcatcatctgtttccatccagtggcgttgtttgcgtggagtgggcagagcaccttcatctgtcagctgatttttgtcgatgacatacatccagcgatgattgttgaaaacgaaatgtagcgtatccagtccgttgttgacagacagacgatccagataaagagaagtggcttctattttgcgtcccgatgcctcacttaaagctgctgccacgagtttgtggtcaaacaagtcttttctgttttgagtgtcggcatccactaatacatagatacgtccgtcgggagtatttcgtacataccagaaataatgcgttttaccaatccactccggattgacattggaatagaatactttgtttgcactgaatttttctcctgctgagtaagcacgacggtaatcttctatagtaccttgtgcgatggctatgtttgtgcagaaaagcatggctgctaatagtaggtttttcatggctcgttaattaatttttgccaacaaagtaaacgataataataagagaaaacaagtgcattgtattatttttctattgatttggatgattgtttgattctttagtacacctttaaattggagaatgactacttccttgaaatggaagtcagtggtgtggtgcgtgaatagtattcggaaatattttgttgtattatacggaagaagctgctcaggagttttcgggaacagtatatgttcccgaagacgtggagaaaatacttctctgatatatgtgatgcagcaagctgctatcaatttatccctttacgcccataaatttgaaaggcagcgctgttttaaaattcttggctgtatttccatgatacatctctccattggcaatagacagtttgaacaccggagccccttccgataaatcgaaatctttcagatttacccaaaaggtattcggagtcagacttgattcgaaaaagtatctcaggttcttgctctccgaaacggttctccattgcgtagtggaaatctcgggactttcgggagtggatatcccgtaaggaacagaagcattgcgtacaacactgaatacactggcaacagctattctttcatcatcggtctcgggcaatgcgttgatgtagaagctggctctggcaaagcggtcggcagcgcgattcgtaccgggcagaaagctcagtcctcctatcgatttccagtattcgctcagtgccagttgcttgttgtaagtaggagagttggtcataaccttgtattccttactgtgatataccgtgagtttcccaccgatatattcaaaaatggcacagtcacctgtagcatccgaaatagataaatgtaaagtagccaaccgggaaccgtctggcatcatatccgaaacgacctgaaaggtatcttcgtcaatgtatgctacggcttcttctacggtggcaaaattgtccagcatatattgcacccaggctgtaatggcaagtcccggtttattcttatctcttacggggtattcggtttcgggcaaccaaagcagattggcgaccaatcctttctcattcataccgtccgtactggcgatctcgaaagcggaagtcactacgctaccgtatctggaagtccattccagcgagttctctccggtttctccgttccgtttcatccctctgggaaacacccaaaggttgctgtgcatatctgttttccagtccatagaacgaccggttgctaccataccattgcttcctgaataaacgactctcgtacacataatttcgatttttagttataggtttattattggttattcatctgtgagatgcaacctgttcggaattctgtcacagaactatcagtcacgatagtgacaagttaacaagaatatgcccttaaagttcagcgtttgtattgatagtgcgagattgctgagccggtttttcaagatatactttcgggaaattgtttatcaggtgaatttttatacctttgcaagatactgatgaaaggttcaaagttttaaaatatggagataaaaaaagtaatttcggataaaaaagagttcttggaactgttgcttttggctgatgaacaggagagtatgatcgaccgctatctggaacgtggcgatatgtttgtcttgtatgataacggattgaaagcgtgctgtgtcgtaactcgtgaaggggaaggaatttatgaaatcaagaacatagctacgatctcttttttccagcggcagggatatggaaaacgcttgattcaatttttatttgatcattatcgggggaaatgctcagaattgctggtcggtacaggcgatgtaccttctacgctttctttctacgaacattgtggcttcaccatttcccatcggctaaagaatttctttaccgacaattacgaccatcctatgtacgaagacggcaagcaactggtggatatggtatatctgaaaaagacattttagtatttgctttgtgatggagatggatataaatcggttggtgaaagagtatggaagctattaaaagagatttaggttatccgattgtgtggatggaataatagaactgtatgtttatattatcaatagaagagcccgtaatattgatagtttcttcatctaaaaagaaaggtctattattcttacatttattattcccgttattaataaacgcagtttcagtttctaataaactttttgcacgtttattagaaacggtatccgagtttattaaaaactattttttgagttttggaagaaaatataaaatgaattaagcggaaatataaacaaaatggggcaataatcatccgactattgccccatatcatggttgctctgatataaagatatatcagtttatgtgtgtgctatgtatctatttttttaataaaactcattcttttttagttttctttcctcaaagatacaacattaaaagccgtttgtcaagtgtttcataagaaaagcggattattcaccgaatagctctgattttatttataaatcatatacggttacagctatttctttggtgataagctcttcttttatgatttgctccataagttcccacttgccacctgccagtccacagccaatacggggcatatgtacacttgccttgtggtcaattgcaaacagggctacctccttcaaacattgccgaacagcgtcataacggatgggagggagtcctttactgtctttataaatgccatgttgtcctatcatattggcgacatataactcattttcaacatttacaaactgtacagctcccaaagtaaattcttcctgtgatttgtaccactggcgataggcttcttccggcattttccattttttagaaagtgccagtacaaacccttttccccatcctccgatatcgttgcaaatatgagtaatcactttgacacctaaaccaatcggtgctgtggcatctccttttatatatagtatttccatcgttttatctttttaatcaaagcaaagatagaaaaaaacagagatatggtgaataataatggaaagttcttctttgaatgaatataaaaatgattataattaaatcaataatgaataaaattaaattctatattaatattattgatgtaatcgtttgttttattcgaatttatctctacttttgcatcataaatgaagatgatatgaatgaagtaaagaaacggttaccattgcaatgtccatcctgtgatgctccattgaaagtaggacggttgttttgtgaagaatgcaatacggaagtttgtggcaattttgaattgcctttactggcgcgcctgtcggagaaagagcagcaatttgttcttgattttgtaaagtcaagcggcagtttgaaagatatggcaaagaacataggagtcagctaccctacagttcggaatatgttggacgatataatagataaactaactaaaatggatatgtgatgaaaaacaaagtaaaattaatagtgaatccgtttattcggattgcaggtggtcaagcgttgatatggggctttctgggcttaatagtatctaccttattgtgttggatatcgggttatcattatcatggtttgcttcattttggaccggcccccaatccggcttggtggtgttatctggcggaacatctgattgtgtggctgattcctgcactgctcttttatctaggaggtctttttctgtctcattcccgcattcgtgtgatagatgtactgggtactgttttgtttgctcagctgccgttgtttggaatgaatctgatcagcctgttgccggccatgcggatgatgtcacaaatgaacatgaatatgtctcccgaagaaatgctggcacagccttattttatcctggcaatgattcttacactgttgggattgccgtttctgatacttactttgatttggatgtttaatgccttgaaagtgtcttgtaacttgaaacaatggaagttatggacagtcgcacttataggaattattggtggtgacgtcttgtgccggttcctgataggatggttgtattaacggcttaaatatagtgacactatcccgtcacgatagtgtcactatgtctctgtgatagtgtcactataacgagcggatagtgacactattttcaatcatggtaattattacaccataattaattttactcattgaaccagtctatcttcttggagaaatacattaccattgccaaaatgataaatagtcccaaactgcctgctaataatgcaaaggtttccagttgaatcaaaacgaagatataaaggtagagtacacttaatagtccggacatgatcaatgacggtttcttctttttggtgattcccaacatatatccgccaactaatataatagtcagtgccgcagataacaaataagcaggattaaagccgatatgttcggagaaggagagcagcagactatagaacaggcagagtgctaaacctaccaataaatactgtaacgcatgaatacgggttttattcatgatttcagtgaagaaaatgacaccgaacgtcagcagaataatcagaatagcatatttggctgaacgcatggactgttgatactgctctaccggtattttgaagttgacgccgaaactggagttctcaatatccttgatattggtattgttgtaattcaccagaacctgcgaatagttgcggttcagattcagtacctgccattgtgccgagaattctttttctgtaatctcgcggttgttgggcaagtagtttcctgtaaaacttggagtattccagttggctttcaaatcaacacgggtcgttttacccaatgggataaagttgatggactgcgaacctttcagcttgattttaatctcataaggcagtttcttgttcttcttcagatcggataagtcggtaatggcgtgtactcccgtagcgcctatccctctgttatccattcccggttcaaagacgtaaactgaatctcccagcgtgatactgatctgctcactgatgccccgcatatctgtcaggttcaggcagatggcagctctgtcaaattgtagttgttccatatccaccctgctttttatcagctcttcgggactgaataaacctttcaaagtcagttccgactgatacacgttcacttcataaatacttcttttgagtatttcggttttcaattgtccattgaccagaagttcgtccggaaacaagaaaaggtccttgattgataccttcttttccccgttgttctctgtcgttaccggatactggatattcagatagggaccggtaatggtttgggcaaggctccatttctcgcttacttcattaatagcttcttcctgcgtacgtccccgctcggaaataagatcttcgatcatgaacatcggtatcatcagaagaatgattaatcctccgataatgatgaccttgattgttttagagaagcggcggaggcatcccagcggttgttgttcctgcacttgctcagttgatttttcattgaaaccgtccataagataatagtgtttagtgaattattatgttgactttagaaaattctccagggcttcaatatgagatttgaaggcttctctgccttgctttgtggcccggaaaacagttcgcggttttcgtcctacaaagcctttgctgcattcgatgtagccgagttcttccagcgcacgggtgtggctggccagattgccgtctgtcagtgagagttgttctttcagaaaattgaaatcagcttcctcattgaccatcagaacagccataattcctagccggaccttactctcgaatgccttatttatattttgaaatgcttctatcatttatgactgctttctttcgtaatgtaaatagaacagtattccatagaggatatgaaatccaccgaaacctatcgtccagaacagtaaggcgtggccttcccaaaaactatctatgactcccagacagataaaagcgtatcccaaccaagctatattggcataggtaaatttagaaacattgaccaaagtcagtccatagaataaaagcatgaccgaggataaaatgtcataatatccatgcagcagcagagaaatacataaagcacctccggtcagcatcggaagtgaaaaattccataatgcccgataggtcagcttgctgaaaaatttttgtcgcagctttttggacttgttgtaagacagtatgccggcagtgacggcggcagctgccaatacaaggatggctaccataatcatcagcttcaaggctacgattaatgttgtgtccggggtaacaaggcaagtggcgatgtatgtacccgctagtgcgtaaactccggccataatagccgctaatccactgatcgagataaacttggaggacttttccatcaactcttttatctcatttactgattctaatgctttatctttattcatataaaaagtactttgtgatgcaaagtaaaataaaagatttcagatgaacaaagattctgctcatttattttgaaaattagagattagtgtgggtgaatggaacaatttatagagttgttttatatgaaattagtcaaacatttgactaattcggtagaaatacatacctttgcgcccgaaaaaggtaaaaagtacttttatgataagagaaggagcagagtttagagaactcatgctacaggttttccgtacccgcatggcttttcgtaggtcgatgcagcggacactgagaaagaacaacgcaggtatcacattcgaaatgcttcaggtactgagctgtttatggcatgaacaaggcattagccagcaaatattggctgaacgtatcgcaaaagacaaagcatgtctgaccaatctgatgaacaatctggagaagaaagggtatgtccaccggaaggaagatccggcagaccgccgcaacaaactggtttatctgactccggaaggagaggagtttaaggaacagattcgtcccatactggatcaggtttatgtatacgcggaacaggtgattggcatagaaagcattgaactcatgttatcggaattaaagagagtatacgatgttcttgaaaacgtatagggtatatctgatggggccgctctgcctgatgttcgccggtcagccggcaaaggcgcagacggattctttatttctttccgtagaccagcttttcgaacggggggtgcagcatagtttgcagcttcaggcggatgcgctcaaagaagccatggcgcaagaacggacacggacggcacgcacatcatcactgcccgatctgcaagtgggattgaaaggaggttttgtgggacagccggtcgtttgggaacggggattgtccggcccgacatatccggatattccggactggtcacagaattacgccatcgacttttcccaaccactgtatcaaggtggcaagattcggaggactatccataaggcagagatggaaaaacaagttgccgagttgcagacattaacagaccaggcggaaatcaaacttggtttgctgaaccaatacatgaatctgttcagccttttcaagcagcatgagatattgatgcggaacattgaggaatccgaattacgcctgcgggatattcgccggatgaaaaaggagggggtgataacgaataatgatgtattgcgcagcgagatgcagttgacgaacgaccgtttgtctttgcaggaaacggaaaatagcatcgtactcgtgtcgcagcagctggatattttattgggacaggatgagaacctgttactgaaaccggatacgaccctactgcatcaggcagttgctctggaagcgtatgacgactatatcacccttgcttacacaaatgatccggcaatgaaattgctcagaaaacaaacggaacttgcccggaacgagatccggttggctcagtcgttgtctcttcccagcatatcgctgtatgcctcaaatacactggcacgccctgtttcgcgtacattgacggatatgtacaacaataactggaatgtaggactgtcggtttcttatcctttatcctcaatctacaaaaacagtcataaaataaaggaaagcaaactgatggtgtctttgcgtaagaatgatgaagagcagaagatgcagagaatccgtatggatgtgcgcactgcttttctgcggcatcaggaagctttgcaacgggtagaagccttacagttgtctgtccggcaggcgcaggagaactatcgtattatgcagaaccgttatctgaatcagttggctattctgactgacttgctggatgccaactctgtccgtttgaatgtagagttgcagctggtcactgcccgcactcgtgtgatttatacttattatcaacttcagaaggcttgtggtcgtctataatatattagggttatggcaacattaaaggaaaaaaaacggaaacttaaaaaaatgagagctcgcaacatcatattaaatatggtgtgtgtatgtttggctgtctccgggctctggtggactattacttatttttggcgttacattaactacgaagtgaccaatgatgcttttgtagaccaatacgttgctccgttaaatatacgtgcttcgggatatatcaaggatatccgtttcaaggaacatcaatatgtgcgtcagggagataccttgttagtgctcgataaccgtgaatatcaaattaaagtgaaggaagccgaagcagctctgctggatgcgcacggtttgcaggatgttcttcactcaggtatcgaaacttcccatactaatatagccgtacaggacgccaatatagccgaagcgaaggcgaagctctggcaactggaacaggactatcatcgctttgaacgtttgctgaaagaagaatcggtgccggaacaacagtacgagcagaccaaagccgcgtatgaagcagctgaggcacgctatcaggcattagtcgcacaaaaacaggctgctttgtcgcaatatgcggaaacgagtaaaaagacaaccggagttcaagccggtatcttgcgtaaagaagcggatttggatttggctaaattgaacttgtcttatacggtactcactgctccatacgatggatatatgggcaggcgcaccttagaacccggacagtatgtccagacggggcaaaccatctcttatctggtacgcaacaaggataaatggattactgctaattataaggaaacacagattgccaatatctatattggtcagcaggtacgtgttaaagtagatgcgttgcccgggaagatttttaacggggaagtcactgctatctcggaggcaaccgggtcgaaatattctctggttcccacagacaattccgcgggaaactttgtaaaagtacaacagcgtatcccggtacggatagaactggagaatatctcttcagaagaaatggcacaattaagagcgggtatgatggttgaaacagaagctttgcgcaaatgataacaatgaaagagttgggagtacccgttcgttcctgggtgcccgattggttggggttctgttgcattttcattgttattcttccggttaccatgctgaatggttcgtataccggaagcatgctcgaagtatcgaatacgcttggaaccaattcggaagatataacgatgggatattatgcggcttcggcaggcatggccattgcttatcctattattcctaaagtgctggcagccgtttcggtcaagtttctcttgctgatagacttgctcctgcagttctttttgagttggatttgcgcccgttcgcagaatgccgatattctgattgcctgcagttttgctatcggctttctgaaaggttttctgatgttatggtttattcgttatgcacagaagattttcagtgcgaagaatatccgcagcgagttctattcttatttttatccattagtgtacgggggcggacaggcttccatgttggtcactgcgcaattggcatatcactataactggaagtatatgtattacttcatgatgcttttgattctggtttctgttctgtttgttatcatctgtttccggcataaccgcccgattaaatcggtgccgttatccgatttgcatattcgggagatgtttatcatttcggtagggctgctgatgctgatttacgtcatcaattatgggaaagttctggattggatggcttctgccaaactttgtgcttatattgtaatttcccctatactgattgcattatttatctggattcagcaccattcgaagaatccctatgtaagtcttgcccctctgtttcagcctaaagcaatcatcggatatttctatatgatgcttgttatgtttttcagtacatccaccacattattgaccaattacctgagcatcatcctgaaagtagacagcacgcatacctattctctttatatctttttgctcccggggtatgtaatcggagcttttatctgtttctggtggtttcgttggcagcgttggcgtttccggtttctgatagcgggcggaatgagttgttttgttattttctttggtgttctttattttggcattgcgccgaacagtacgtatgaaatgttatatctgcccatcttttttcgcggattgggtatgttgactttgattatagcctttgccttgtttgccgtagaagatttgaacccgaagtttttgttgtcgaatgctttctttctgataatcttccgttcggtactggcacctatcatggctacttctttttacagcaatatgctgtatcgtctgcaacagaaatatatatattctttgtcggagactatcacgactgccgacccgctggctgcgtcccgttatactcaatctctgaataatgcgcttgcacaaggacatagatatgatgaagcggtacagatagctacccattctctttatggaactttgcaggagcagagtctgttgcttgcactgaaagaaatattaggttatctgttggtgatatcggtcataatagctgttatctcgcgtttcattccgtttcataagacgattcgtgttacatttgccaagacgggagatgatatggtatagcatataaaaatgagtaaatcatcccaatttttcaattctttttcctatatttggctggtaatcactggagaacagattctctccggagtaggacagatctaatcttaaacacgaatttgaaatagatgaattatgatgaacagggctatcctcgtcttactattcctcttgtcggcactgccattttctttgcaagcccagatgccggacagtatcgttcgtaaattatcgggctatattgaagcagtgcagaattttggagaaatgctgccacaggaaaaagtctatttacatttcgacaataccagttattatcagggagaccctgtttggtttcagtgttatgttgtgacatctgaactgaaccgcccgtcggatttgagtaaaaccctttatgtcgaattgttgaatccgggtggggaagtcatagcgaaacgtgtattgcctgttaggaacggccgttgccacggtagtttcgaattaacacaattacctttttattccggtttttatgaggttcgtgcttacacgaaatatatgttgaactttggagaggaggttattttctcccgggttcttccggtatttgataagccacgggcagctggtgattttaaagaaaagaacatacagagatatgctgtttataaatatccgcaggtacggaaaaaaacggctaaggagaaaaaagtcaatctgaagttttttcctgaaggaggaaatttggtcgaaggcattccttcccgcgttgcttttgaggcaacggatgcctatggaaatccgatcgcactgtccggaacggttatcaaccgggaaaagaaagaaatcgcctcctttgccactgtacacgaaggacgtggcacctttgtgtatactcctacgaacggagagaatcataaggctgaggtggagttgaatggcaaaaagtaccgttttgatttgccggaagcccggttgcagggatatgtcttgcaagttgataatctttcttcggaagacagtatagcagtcagtgtacaaaagaatccgcatacaccggagtctgtcttaggcttagctgtgcttggtcatgggaaactgcttaattattgtctgttgaacatccggaaaaatacacctgtctctttcaaacttgacaagacggaatggaaggcaggggtggcacagatcgtattgtttgatacagcaggacagattattgccgaccgccttatctttatgagaaaaccggagccattgacaatcagtgtccggaaaaacaaagaggattatcagccgtttgatcgtgtcttattggacttttcagtacgtgacacggcgggtaagcctgtgtccgctccgatatcagtatctgtgcgtgacggatgggaagaagtggaaagccggcattctatgttagcggacttattgttaatgtctgagattaaaggctacgttcatcgtccgctctattatttcgaagcggatgataaagagcacagaacagctttggatcatttgttgttggtgcagggatggcggcgttatgcatggaaatacgagtcgggggtagaaccgtttgaattgaagtacatgcccgaacaagggattgaagtgcatggacaagttgtttcatttgttagaggtaagcctaaaccaaatatacaagtctcttcttttctggcgaagcggggagatgaggaaacttcgccgggagcgctttctcttaacctgtttgaagcagacagtgtgggacgttttgcttttattaccgatattattggcaagtggaatctgattctttctgtgatggagaaaggtaagcggaaagaccaccggattgtattagacagagtcttcagccctcaacctgcacaatatccgctgggagaaatgcagataagcctgtccggcagagataaaccgggagcagaacaggaactacagacagatactgtgattggtgatgatatcgattataatcgttttatggatgcttatgaagattctctgtcaaaacggggtatgagagagaaaaatcaccgtttgggtgaagtggtggtgaaggctaagaaatggagtcgtgagaaggatatttatgaaaatcgttcgaagtcggttgcttactacgatgtaccttcggagatggatgatattttggataagggaggttatatcggtgaagatatccacgagctacttgtccgtatgaatcccaatttcatacgcaggtatagtggtggtgaggaatggttgcagtacaaaggtcgctctcccttgtatgtgataaactataaacgaacggaggctactgaaatagatcagacccgataccggacacttcgcctggtggctatcaagtctatttatatcaacgaggagttatcggcaagatgtcgttatgctgacatccgtatgtctccgatggatgtagatgaaatatatggttgtgctgtttttattgaaacctatccggaaggagagattcccgtaaaaggaggcaggggagtcagaaaaacttggttggatggctatagcgaacctgtagagttttatcatcccgattattctgttcttcccaaagaagaggactatcgccgcacattatactggaacccggaagtgatgccggatgaagcagggaatgctcaggtgaggttctataacaacagtcgttgccgcaggttaaaaataacggctgaaatgatttctgcggatggggctattggcatgtttaacgagtgatataaaaaaagagggtgttttgatacaccctccccataactgtaatatttcctttgatggtgaaacgcttataatgtaactcctgttttaaagatggcaatttcacgataacctttcttctcgttattaacgaactcaccgcttgctactttaatcacatactcgataaagcgttcgcaagtcttttccatcggttcgttctcaacgatgactccggcattgaaatcaatccatcccggtttgtttttagccaaagtagaattggtggaaatcttcatcgtcggaacgaaagtgccgaaaggagtaccacgtccggtggtaaagagtaccatatggcatccgcttgcggcaagggtagtagcagctaccaggtcattgccaggggcggaaagcaggttcagtcctttcttttgcagacgttctccgtaaggcatcacgccggatacatagcttttaccacatttctgtgtacatcccagtgctttttcttccagagtggagatgccgccggctttatttcccggagatggattttcacccacaggctcgccatgggacaggaaatattctttgaagtcattgatcaagtgtacggtctgttcgaacaggtctttgttctcgcaacggttcatcagaattgtttccgcaccaaacatttccggaacttcagtcagcacgcttgtaccgccttgtgcaatcaggaagtctgagaacatgcccagcaacggattggcagtgatacctgagaaaccgtcggaaccaccacatttcagtccgacacgaagttctgacaaaggtacttccgtacgttcatctttggatgctttggcatataaatcgcgcagaatatccattccttcttcgtattcgtcaccaactttctgggttaccatgaatttcacacggtcctggtcatagtctcctaagaattcacggaatacgtccggctggttgttttcgcagcccaagcctactatcagtactgcgcctgcattcgggtgaagtaccatatcgcgaagaatctttttcgtgttttcgtgatcgtctccaagctgtgagcaaccgtagttgtgcgggaaagccacgatggcatctaccccttttccttccgtttcacggcgcaggccttcggccagttgtccgatgataccattaacgcaacctacagtcgggataatccagatttcatttcttacgccgacatcaccatttttacggcggtagcctttaaaagtgaggtttttatgagggatatccagagtaacctgagtcggatggtaggtatactccaacagtccggcaagattagtcttgatattcgtttcattcatccagtctccctgtttttttgccatacgggcatgaccgatagggtagccgtacttgattacgttctcgccttctgcaaaatcttttaatgcaaacttatgtccggcaggaatgtcttcgtttagtgtaatctctattccatctacggatagatgctctcctgccgggaggttaacaatggcaacggcaacgttgtcggcaggattaattcttaaatactttgtttccatgtacttgtttagttgggttttgttgttatttgctatggtaatagtctattgtttctacagtcaacaagtcaatcggcatatagttgatgcaagtcacgtctttcttgaaaatgaggtgatcgcaaagcgccttgatgccgttgaggccttgcagttccggttgctgggcgatgaggaaggaaacgcttccttctttcaggcaagtgacattccgttccagaaggtcgtagcctatcagattgaaatctttctttccgcgactttgcaggtattcgccgataatgtagacttttgaattgaaagtgattccattctttacgttcgggtgagaacggaagaattcatccagcatttcgttatcttcatcattgcgttcggcatgcaagtcaagctccagtatagtacaagacggatgatgttcctccatgtactgcctgaatccgatttccctgttctcttgctggttagaaccgacaattccttcatgtatcttacggaaaataacgatttccttttcgtctctggcaagcagcattagcatacgggcggcaaagtatccgctttggcgtgagttctgaccgaagaaggcgaggggaggcacgtctttgatatttgagtctatatatatataaggtatatccaacgtttgcaactgatcagtaaagcctttcgtatattgcggagccgtaggggccatcatcactccgtccggttgctgagtcaggatagcttcgctggcgtctacaaacgaatgatagtcgtatggatcgtaatagttgatctttaccgaggtattgaagtccgagtaggtcgcgatagcttcgtggatacccagttctactgctgtccagtattcgccttccaggtgttgaggcagaagacagatgaatgtgtacttcttgttggaagccagggcactggcatacatgttaggttgatagtcaagctgcttcagaatttcttccacccgttttttgcttgcttctgatactccgctgcgtccgtgaatgacgcggtctactgttcctacagacacgtctgctaaacgggcgatgtctttgattctgattctttcgggcaatttattcatacgatcaccttatttatataggtttatgtgctcgcacacaataataatcttaatattttcgatacaaatatataacaatttttgtaattacgaaaattgttgtatctttgtgcccgcacacgaaaggtgtgtggtataactctgtttatgtattaatagtcatgtaatcagtagtttaagtcataaaatggggtaaaaatgataaattgaaacttcataatattaataacttagaatttaaaacataagattatgggaaagaaagtcgttacattaggcgaaatcatgcttagattgtcaactccgggcaatacccgctttgttcagtctgactcttttgatgtagtatatggtggtggagaagcgaacgttgcagtaagctgtgccaactacggacatgaagcctatttcgtaaccaaattgccgaaacatgaaatcggacagtctgctgtaaacgcattgcgtaaatatggtgtaaagacagactttattgctcgtggtggcgaccgcgtaggtatctactatctggaaacaggcgcttctatgcgtcccagcaaggttatctatgaccgtgctcattctgctatcgctgaagctgatgctgccgacttcgattttgatgctattatggaaggtgctgactggttccactggtccggtatcactccggctatttctgacaaagctgccgaactgactcgtctggcttgcgaagcagctaagcgtcatggcgtaactgtatcggttgacttgaatttccgtaagaaactgtggacaaaggaaaaagcacagtctatcatgaaaccgttgatgaagtatgtggatgtatgtatcggtaacgaagaggatgcggaactgtgtctgggcttcaaaccggatgctgacgttgaagcaggccacacagatgctgaaggctataaaggtatcttccagcagatgatgaaagaattcggattcaagtatgtggtttctacattgcgcgaatctttctctgctactcacaatggttggaaagctatgatatacaatggcgaagaattctatacttccaaacgttatgatatcgatccgattatcgaccgtgtaggtggtggtgactctttctccggcggtattatccacggtttgatgactaagcctaaccagggtgcagctcttgaattcgctgttgctgcatctgctttgaaacacacaatcaatggtgactttaaccttgtttctgtagaagaagtggaagcattggctggtggtgacgcaagcggtcgcgtacagcgatagttgagagttgagaatggagagttgagagtttgaaaaatcaattcatttaaaataagaaattaaaatggcaaaattcgataaaatagccgtattgaataaaatcggctctacaggtatggttcctgtattctatcacaaagatgcggaagtggcaaagaaagtagtaaaggcttgttatgacggtggtgttcgtgctttcgaattcaccaaccgtggtgactttgcacaggaagtatttgctgaaatcgtgaaatatgcagcaaaagaatgtcctgaaatggctatcggtatcggttcaatcgttgatccggctactgctgctatgtatcttcagttaggagctaactttgtggtaggtccgttatttaatccggaaatcgctaagatatgtaaccgtcgtctggtagcttatactccgggttgtggttctgtatctgaagtaggttttgcgcaggaagtaggttgtgatctttgcaaagtgtttccgggtgatgtatatggaactaactttgtgaaaggtttgatggctccgatgccatggtctaagctgatggtgactggtggggtagagccttccaaggaaaacctgactgcatggattaaagcaggtgtattctgtgtcggtatgggatcaaaactgttcccgaaagacaaggtagcagcagaagactgggcttatgtaactgcaaaatgcgaagaagctcttggctatattgccgaggctcgcaaaaaataagattagagagcgaaagctatctataaataaaaaagaggctgatgcgtcagcctcttcaaaatatgcctcaaagggttagttagtttagttagtaatgaggcatattttccattttgtttaaaggtgtttaaaggggataagtcatcggaatgagtgatcatttcggtgacttgttttttttgttggtcgtaagcgcttcttttaagaatgatgtggcattcgcattttgataatccgtccgataacgagcgctgcaacgtacaccacggcaaagcctacgattgaaaaaacaaacggtttctgttcattgaaagtgcggcgtggaggtacagcggtataagcctcgttggctgtagtctgattgtcagacttggtggctgctgttacttgcagtgttgtttctgttgctaccatttggcagctatctgtagttgtggttacagtatccactaatatttctgtagacatctttcttacccttttaagttatacgtaaattcctgttatggtttcaacacagtacttatggtttagttcaaagggattcttaaaatcagcgcaaaggtaactaaaaaagtaaacgatggagcatgagaagcatattcttttcaaatgatttgatgtagatcaattatacaggcagacaaggcacatgcaatcggggttatcgctgttgtgcaacgccataccaatgataaaagttgtatgtgtgttgtgctaaagaagaatctcttcttctgtacatacaaagaggagattcttcacgatgttaattgttcggacgacaaagatgccttaattagttattcaggtacataaatgatttcaccgttatccagttcataggcaatgcctacctttttcccacgtttaccttctttcttgtcctgatcttcggacggggtataccggttgattttattgccttccttggtaatgatttccatattctctttacccggattctttaccatcgtatagtcttcctgcgagaaaacctctgtcatgttataccggctgacaagtgctaccatcaatgcaacggcaaaaaccatcgcaatgtcgaacagattggatactacgctgatcgggtcggagtcttcctcttttcgcaataggttatgtttcatttctctgaggttttatgaatggaacgtttgtcattgagcaattcggatatgaattcaaggttggtcatatcctgcaggtaccagcgttgtttcacttgctgtgtaaggaagcctacggcaccggctaccagtccgactacagtggtggcgaaagcgatctgcatattgtaagccatggaagcaatatctccgctggccagtcctgcgagggcgggtcccattggaattaatgttcccatcagacctaagatcggtcccagtttggtcagggtcttggagatggctaagtctttgtccgctgcgatttcaaaattagccaataaacgttgtacctgtgccggagtatcacgggcgtccaatacctgacgcatataggtaatgacaagtgatctagaattttccggaagtttggaactcagttcttctaccgtgtccggagtcagcttgctcagctcgttgcggagcagggtttccgttttacgaatggacagatattgaccatagaaactaccggcaagtaaaatcgcgcggcaaaagaggatgattaataaaacgatgacaggaacgagcaagcctgttgaaatccagtataaaatatctgatataaagttcattgttattgataatttgaagagttatttattctattattgtttcacacttttttctttgtttctgtttcggatgttccaccagagaagtccgagaattccgccagccagtgcgatgactatgacgcctgtcaatgctttccagtctatttcactgacacctgctgcggaagtctttccgttgactgtggcgacaattcccaaaacggctaccagggcattggttaggaaaaatagttcgaggcgcagttctttttccggcaacaaatagagcagtataaatctgccgcaagggatggctgccaggataaaggctgcatagctccatgctatcgtttgaaatgaagtacccggaaaagcaaagatgagatataccagcccgctgaataaaaccgggaaaatcaataatcccggaaaccagcggagaaaacggtacatgagtatcatgcgcggcttgaccggatagtcattggctacgtggacggcaagcatggcataagccatttgtatgcagacttccacactgaggagtacggaagtatctagcatcaagggctgattgcttagccaattggctatctgagtcttcgattgctcgatagcatacggccacatcaatccggcgaagacagcgcagatagcggtgataataccgaccgctattaatttccagaacgtttgcttcaacagaaagttaaatgctgtaagaagcataagtacaagaacaactgtatccattatatgattttacaatttacaagttacgattgataattcacaggacgtgggttacatctgactgcttttgcggcgcttgcgtacaaagagtatcagagcaagaataacgataatgacagcgatgcctacggctacattgcttaatgtatttgtctgattttcggctgtctgattcatctcttcttttttcatcaccactcccttgttgctgccgcttgcttttgcttcacggattttagagatattttctttgtactgtgtagcggtttgtgcgtctgctttcgatgcaatgaagtcacggagcttggcattgtcacaaacaaatccggaacaagacgggcggtaagtattgacaatctccgtatgaagtttgctaagttccgctacctgttcttcacttgcttgccacaatcccttacgggcgctttcgagcatgacggcagtcatctcttccaaagcggcaggattctgttgttcgaaatattgtttgactcccaagttcagttcatccttcacatatacattatatatattatcccaaagctctttgtcgattgcagccggtttcatcacattccatccataggtattggtgatcacttctgcaaattcacttgccgaagaagccccgcctttcattttctctttgatgtaagttgggttcaggatagtggtgcgactttctacgccgacagcctctttcagttcctgcatcttcatatggttccggttgcgataatcactgaggtaggcatccggatctttgccggtcacattgcgtacggcgagattcatacctcccataaattcgtatacatggtcaaggcttaaggctccccaggtattactttgtcgtggttgtacgacaacatccgtccgggtcagtgcagcttcgaaagcgaacttttggaatacttcccaattcttttcgctgccgtaatacgcgcccatattattgagataagtatcggcgatttccgattcattctcccagcggtcgccggattctaccatttcctgaataccggttccatacataccgttggctcctccgaatacccggaatgttgaaatttcgcgggcatctttcgggcttaatcctttttcggtcagcacccgttcggcttctattacgctggaggcaacctgattttcatatttgtcgtctttggcggcggcagccatttctactgcacggttgatgaggaagagacgggaggcggcaagatcacgaagttgtccggaagtctggactaccacgtcgatgcgcggacgtcctaattcggctgaaggaatcagttttaaatcgctgacacgaccgaaagcatcacggacaggctcaacacctaacatataaagtacctgtgcgatggttgcccctccggtttcaataaactcggatgaccatagtgtataactgaccttgcgtggtatggagtcgttgtgacgttgcttgtacctatcaattgtctgcttggccaaagcaatacctttttcccaggcagactctgtcggagtcgcttcggcattaatggcatacatattacgtccagtaggtagcgtgttcggattagcgatcgggtcaccaccgggtgtgggagctgtgtatccgcctttcaaagcattcatcagactgctcagttcctcttccggacttgtcagaagtgcatttttataattgcctacattcttgatggtacgttctacttcagctactgcaagcgcaaattccacctcttctttgctgtattctttcggagcctttcccatagctgccatcattgctgacataccctgcggcttttcagtctttccagccattgccggtttgcccgaagcgtctgtggatgtatccttattagccttcatgctggcttccattttctttaaagcttccggactggcacccattgatttggccatttccatcgctttttccgggtccatgttagcacccattttcttcatggcttctttcatgcctgcaggcattttaccatgaggtcctttttccatttttgccgaagccggatgaccattgcccgacggctcattatcagtctgatcctttttggctgcggcagccatcatcattgccatcatgcctttgggggcattgcgctcggcttctatctgtctcgcttttgccaactcttgcggagtgattccggctgtgtggcaaatcagttcgtcggttgccagtgaagggttagccatcagtctctctacgagaaggcgggcaggcatgagatattgctgggtaaagacacttcggtgtttttcggcagattctgtagctttgccgcgttgcttgtcaagagcaaaaagactataggcaatcggttctgttgccatcgcgtagacagaagaagttattctttccggttcgtaaggaactcccattgtgtaaagctgccccgtgattttctctgtagccagttcttcggcaaagttttctacacgggcgatttcatcttccgtatacggtttattagccatactgtccagtcctaaatcacgatggattcccatcttcacagtcaaggttttcacagccagcgactcctgatctttgtttgccttctgggagttattatagattttgatcttttccattaattcccggtaaatgccgcgtacgctgctttcaaggaaaggaggagtgagatatgattgcaaggtagcataagaacggcgtttggccatcataccttctccgacgtttccgatagagtagaggtagtagtggggaacggctcctaccaaacggtccggccagtcattgctgcataatgcgacttgttttctcggagtgaattcgagactgccgtgtgtaccgaagtgaatcagtgcatcggctttgaagccatgttgcatccacaggtatgaggcaatgtaggtgtgtggcggagccatgtcggtgccgtgcaccacctggaaggagttgtcaccgcttccggcagcgttttgtggcaatagcacaacgttaccgaactgtaaacgggcaatacctaatttgccgtcaggagtcaccatatagttgccgggaaattcaccgaaaacatctaccacctcctgatacttttcgggacgaagcgattctttcacccagctttcatactgttctttggtgatcagttcgggatgtccgttttgcatgaagtcgttgaaagctccttctgcataagcgttgaataccgccccctgggcttgtatcatttttcccagttcctgagcgttggcaggcagaccggatatattatatccctcttgtttcatacgaagcagaagattgtaaagggaaggtactacttccatgccggcagcggtcaatgcgttctgaccgggacctttgtaataatagatagctactttcttctcaaaattaggttttgttttcagattcaggtagttgtctattgtagatacaaaagtcttcagacgttcggggacggcatacgaatggcgcaatccttctttatcttcatattgtgcgaaaagggcgaaagggcggatagctccgtctatttccggtgttacgatgctctgtgacataaagcctcccgacatacccatcggatcgttttcccattcatccacaagactgttgattgtgagcggagcgaacaaaaggatatttctggctttcagataatccaccattttatctcccatacgtccgtgtgccatattgatgacggcatcgggctgcacttcctcaatgaatgacatgaatcttgtcatggattgaacgggataaacattatatcccgcattttccagtgcttttatcagatcggtggcatctgccatttgtccggtaatcatgatttttcgtgccccttctttataaaggttattctcttgcatgaatttctcataatcggcaacggtgaggaactcctgttcatcatccggattactgattccggcatgataaagcatatcgctcggtctttctgtcggatcttccacttcgggtacaacggaagcctttccgtcaatggctttacggatatagttcagcatattgcggtagttggtctttccgccgttgctcagatagccgcgtatgagattctgctgtatactgtcgaggttgcagatgttattggcagggttggtagccatagaagtgtatacggggatacccttatctgctgcctgctgtatttgctgacgttgttcttcgacaatgcgcagtcccatgccattgatgaataccatgtcataactggtcagacgatcgaggttgtcaagagacacttcgctgagtttgatgaatgaattgtcgttggctttcgagatgcttccctgctgtatggtctggaagttgacgaaagctattttggtagcgctgaaccaggcattccatgcggatagacctattagggctgctacaacgatgcatccacctaaaatgattttacttttctttttcatttctcttatttttagctttgtatgtagttctattgttgccgtttattttttgaagagcctgtctatatccagtgatagtcctaatgtcaggttggttcccgttgtggtaggagagttgaaataataataatccggcacatagtcgaacaggttgtttacagccagattcatattgattccttttataattcccaacgagaaagtaaaatcccatatcatatatcccggatactcgactgcctggcttccggcagacggattgttgaaactatcgttatagatgtttgttttaacttttgacagcaaacgtccgttgagtgagtagttgaaatctattttgttcagagtcttgccccagtcgattcttacagttgccgtatggggacgtgtatccgtgaatttcttttgaccgtcgcgcatgaactcatgaatatatgtgtatgacagacgatagccgagtccgcaaggatacttggcggaaacgttggcgtcaattcctgcaatatccattttgtcggtattggtatagatttgtcctttggggtcttcgctgtaaacggtattgatacgattgtgtaccagattataatatcctgtaatagagaagttataacgactcttggtatattcggcagatacagagaaattatggcttgtttccgacttaaggtccggattaccataaatcatcatcatatttgccatattgaacaccatatacatctccttcagggtaggagagcggaatccttgcgaatacgatcctcttaatgaacaattgcctatcttatacatcattcccaaatgtggagacagatggcgtacattggagtcggagaagtagtcgaaccgtaatccggctatcacattcagtctttctgtggggttccagtcgaactgaccgaacgcatctgccgtatgcatggtgtggtctgcgttatcagtgaattggtaagacatcagataatcgcgcaggtagtcggcgccgacagtcagcgtatgctttccgttgaaggtataattatagagtacatgcacattgtgctgtacattactgtaatcacgcacgtcatttttataaagagactgataatcactcttatcatactggtcgaaagtataaccgacttcaaggttactcattatattgaaggtgtagttagctttcattccaccgctgaatccacggtatctgtcctgggtatcccccggtttattgcgttcacggaaataatagccgactcttcccgtcagtttgagcgtttccagcggacggtatattaaacgttctttgaagttccacacccggcttccgaacactgtagagaaatctcccggattgtctacggcataagtgtctacattattatactgcacgttggtcaggctgttgaatttacctgcattaaatcctgcagtgccaccataccgctggtcgttgtgttcggagaaacgtgaattaagatttaagttccatggatcgtccgattcgcgggtgatgatgttaattactcctccgatagcactggaaccgtaaagggtagatgcagcacctttcactatctctatgcgttctacattgtcgagattcagacgttcgtagtctacattattcagtgtttcccctgccagccgttcgccatctaccagaaacagtacggaattaccgccgaagccttgcatattaatagcggtttgctgatccatggagaaggaaaattcgataccgggcaactcagttttcagcaggtcggcaacgttgttggcgttaactttcttaatatcgtctgaggtgataacccgggtgatgatgggagcgtccttcagcaatttgggagtacgggtaccggttacaacgactgtcccgaggtcgaactgatcttcggataagctgaagttaactttctttcctttctcggtggttattcttttttgttcggtttgataacctatgtaagatgcagtaatgatatatgaaccgattcccggcaattgtaatgtgtaggttccgtcaacaccggtgacggctcctgtttctcctccttttatggaaatggtcgcacctgggaggggttcaccattggtatcagtaacacgtccgctgatgtgctcggttgattgttgtgcgaatgtggaacaggttactataaaggagaatatcaagattgatgctataaatgtaggtttcattctttgtaattggtttcttagttgttttcttcgaaatcaagcggatataggaaatcgaagtcgatatatccttttatgcctctggcattggtatagttggtaaaacgaatggctgcataggtattatccttcaaccgtatcagatagacttgattggacatggtgtaaataggaggcatacttgaagtgtctacgtttaaccagccggataagatatcattacgatagtcttctgtatatttaatgtttccttccatcataccggacatatcgattgctattttatctgtcgtccattcgtcttttacaaaattctcttcggcgggaagttttccactggccttcagatcatcaatacttgtataagttgtctggaaggctgcaccttcattggttttgatgtcgtagcggtggatggcaaggtcccattctgccggtatctcgctcttatgttcctctccgatttcaacagttgttgctttacgttcggataggtcgatatagacccagttagtgtactcagtagcattgatttgtgaaaagctactttctttaatctccatttctgcttcaatgggatcgtcataaatcccttcaaacattccattacaagctgagagcgacatagccgctcccagtatcatgatatttttgaaaatagcgttactgcttcttctcatttcttcttttagttatttattgtgcactagtttctttgacgtttccggtgaatactgcggtgattgccataggcatggctcccggtttgaagactaccgtaatattagctttaccatctgccgtaactgtaccttccagactttcacctgtaattggagtagtaccgcttgcggattcggcatcagaatcaaatgcgcctaaactgagtgtgtagccgccatctgctttttcaacgtttactccgctaatcgtgaagtctcccaaattcatattaccgcctccggtcaaattgccaaaaccgttaagggtaatgtctactgtcgtttcggatgcacgtttaacgacagctttacaatcttcggtagaaccatatgaacttcccataacgctgatagcaagattagtgttatacttataagtagcggctacgtaataagcaatcggagtttctgcctgaatgaaatcaatatcgatgccacccattggtacaggaacattggctttcagggttagtactttagcatcgctgacactaccttccagtgtatattcgtaattggcaggttcacttccgtccatagccagggtaacttcaccttcgcctttaaatgatttggaagaaactttcaggttattcaggataaaatctccggaccctgatttataaaccagattgacggtaccatctgtattggcggtaattgttgcgctggcatcgccgcccatcagataatcagagaacattctgctttcgccaatagaataacccttataagtgccggcaatggcttttgcttgctcagtattgtcggtatcgtcgtcatcgtcactgcaagatacaaaagtaaatgagaatgatagtgccataagagcaaccatccataagtttaagattttcatacttaattttgatagataatgattaatttattttcgtttgcaaagttatagggatatataagcaggggcaatacctaaaagaaatgaaaaaaaacaggcgtttaattatatgtaggtattgaatagggagggataagtccttatttttgcagtcatttacaaattaaatattaaaaacacgaaattaaaaagaaaatgaaaggtggctacagtagaaaaagtgtattgacagggattacttctttcctgattgtattttttactatgcctttggggcatgcattgatgatttttatggagcacgtactttcgtctgcagcgcttcattatgcggctttctcaatgggagctgtgggattggtgatggtgattgtcggagtatttgcaaaaggagatacccggcagacgttatggggacttttcgggggactgctcttctggaccggttgggtggagtttatatatgtttactatgcacatcgttatgaggtgcaaccgttgctgaatgctgcaggggaagtggttacgaaaccggagtatctgattatgccttcctcattcggcttttgggtgatgttcatgttgatttatctgttcagtataaagagcggatgtgacttctttacctatcttcagaaggtctttttccgtaaaagcactgccaccatcgtagtgaagccaatgacgcggcatacttctatcgtaactttcatggaattgaatcttatcatgtggaccagctatctggttttattgttttgttatgatgagaactttattggtgagcacagtcctgtcaccgctattgttgcattcggctgtctggtcggtgcattctttatgttccggcgtctgttgaaaatcagccagtggggatatgccatccgtttttctattgcgactgtcgttgtgttctggacatttgtggaagtacttggacgctgggatctttttcatgaaatatgggtggaaccgatggcttacaagaccgagatgatcaccatacttctggctttcttcgttcttctggctttcttgttttatcagtctgcccaaaagaagaacagccgcaaatgaaaagaaaatatccgtatcttgatgttagagaaaagagtgaactaatttcttagataactgttttctagatatatgatataaaaactatttataatatggaacctcatcatcacgaacataatcatcggataacgtctcttaataaagcctttataataggcatcgttctgaatatctctttcgttatagtcgagttcggagttggtttttattacgattctttggggctgctctctgatgccggacataatttgggagatgtggcaagcctgattcttgctatgttggctttccggttggagaaagtacacccgaatagtcgttatacctacggatataagaaaagtaccatcctcgtttctttactaaatgcagtcatattattggttgctgtcgggataattatcgctgaaagcatagacaagctgtttcatccggtatctgttgacggttccgccattgcctggactgccggagtaggagtagtgatcaacgcacttactgcctggctttttatgaaggataaggataaagacctgaatgtaaaaggagcctacctgcacatggcagctgacgcactggtctctgtcggggtagttgtttccggtattattatcatgtatacgggatggagcatcatcgatccgattatcggattgggcattgctgtgattattattgtttctacctggggattacttcatgacagtcttcgattatcgctggatggggttccggtgggaatcgatactcagcagattcagcaactgatagtggaacagccaggggtagaaagctgtcatcatttgcatatttgggctatcagtactacggaaacggctttgactgcacacgtggtcatcgataatatggaaaaaatggaagaaataaaacacttgatcaagagccgattagatgaagcaggcattcatcatgctaccttagaattcgaatgtataggcgtttcgtgtgaaacagaaaataactgttgttaggtatttgtagcatataatatagttatatgttgtgattgtccaggctgtaaagagtatctatttttgcagtctagattattctatataacaaatactacaatgaggtcatttattttttctttgattataattattttttcaactatttattctcaaacaatctgtgcccaacaaagagatattgtattaactggtaccgttactgaccatcagggagagcccttgccaggtgttaccattcgcgttcggaatacccagtttggtacagtaacggatgcagatggacgatatttgttacgtggccgatgggaagaaggagatatagttatgttttcttttatcggaatgaagaatgtccgtgtgaagtatgtcggacaaaaggtacaggatgctgctatgcagcaggatacccaatcattagaagaggtggtaatagttgcccgtcctaatatcaatgaaatggatattcgtgcaaaatccggagttgtgcagcgggtagacatggaacgattgaacagtaaaccaatgattgatatgtccttggctttacaaggaacggtgcccggtttgattgtgaccaatacaggggaccttggttcaaaacctaaaatacgtatccggggaaactcttctttccgtgaaggagatactgccaatgaaccattgtacgtaatggatggtaaggttatatcgtcagatgcatttatgacacttaatccgtcagaccttaaagaaataaaagttctgaaagatgctgtagcttgtgccttatacggtataaaggctgccaatggagtgattgaaatcacttctttgcgtggcaatcccgatggaaggctgacaaccaattacagttttaatatgggtatcactactcggggacggcgaggagtggaaatgatggataccgatgaaaaactggaactggaacggcgtttacagaatgcctctactcccggctatcggtatagtgaagattattaccggaagtatttcccgaacagcccggatttgaatagtatgattgccgagggacagggagtgcttgattccttgaggaatattcataccgattggtttgatgaattaatacatcgcagtatttatcagcgacataaccttagtgtcaggggagggacggagaacacctcttattatatatctgccaattatgcccaacaaggaggacgggtaccggggaatgatacgcatcgtttcaccgctcgtatgagtcttgatcagaaattgggacgatggggatatctctctctgagtactgatgcaggatattcggagacagatacaccgaatggcagttcttattcgcctaccgatcttgtatatcaactcaatccttacgaaacgacaactggaaaattagtatcttattcaaatgcatcgtctgattatacttataatgatctggtcagacagtataatagtaaatcgacagataaacgcggtggagtaagtggaagtttaaacttagagccagtcaagggattgaatatcgatgcggtggcaggtattgatgtgttgttgaacgaaatgcttaccttggtaccttctaccgctttatcagaacgtgttggaggagtacgggaagaggaacgggggaagttgacgaagggaaagaatgtgacaacaaatgtatcttcaaatgtccgtattacctataataaggaaattgcgggcaagcatgatctgacctttggtggtaatatggactattatatgactgatgttgataatgtttctattaccggttatggagtcggtacccaaatgtctccggcacttatcaatcaatctatcactggaaaccggaaaccatcagtgggttcgcataaagaaaagactgctcaattgggggtaggtctggtggcggggtatagctttgcgaccacttatgacttttttgccacttacaaagctgatgcttcttctgttcttcccaaagataaacgttggaatgccgcatgggcagtcggattgggatggacggtcagtcagtatccttttctcaaagacaataaattcattacacgcctgaatctgaaagcttcctacgggcaaatggcaaacctggcgggtgtatcagcttcttcaacgataggtactttttcttattctactagttattacggcaatgctcgccttttacaattggccgaactttataataccgacctgaagccggaacagactattactacagattttagcctttccgttgaatttcttaagcgtctgacactggatgctaatatctatagacgtgaaacgacggatgcgttgcttgatgttcctgtccctctgtccaatgggttcagtacaatgaagcgtaatattggaatactccgtaatgaaggtttcgaattaagtgccttggtgaagctattcgatactacggactggcgtttgtctttacgcggttcgttggcttacaatcgtaataaagtggtcgatttatatcatgcagatcgtttatatgtaagtgaagaggctattgtccccgactatgaggtggggaaatcttatgatatgatttacggactaaaatcgttgggtattaatccgataactgggcttcctgtatttctgggagcagatggcagcgaagttcccgctaccgagaatccgaaaaaagagaatatagtagcattggggcattctacaccaccatatagcggtacactgaacctgagcttttcttaccgtgagtttgatttggatatggatttctattatgtgttcggagggtatcagaaatataattattcgtatgttcgcgatgacgataatgccaataaaaatgcaattaaaggacagttgcagaatatgtggtttcaaaaaggggatgaagggaaaatttattattctcctttctttagctcatctgctcttgcttcattgactgattatgccaatacggaaacggttggtaaaagcgattacctgaagctatcgatggtgtcattacgttaccgtgttccgcacgcatttctggagaagaattgtaaatttatcaagtatgctaatatcgcttttcaagcttctaacttatttatgattactccttataaagaatccgatccggaaaccggttcattggcgggaacaatgcagcctgtgttaactattaatttaagtttgactttctaacagatggaaatatgactataataaaaagaaatagaatgcaaggtcggatgaagaccgttatttgttattttttgtcggtattttgctgtacggcttgttcgcttgatattccctacgaaaatcaattttccgatccggatgccattactacaccgcatactgcccgtgaattgctggcaactgcttataattccctgccaaatccggattttgagttggctgtattgggcgatgattttgttccgacctatttgattaacagaaatgctaatctgaataatctttataagtggcagccacaaccgatcgaagatttgtccctgtctttgtggaaagattattatgcgacgatagctattgtcaatgccgtattagagcgggtagatggcatatcagtgactacagaaagagaaaagctgcaattacaatgtatcattagcgaagggaagatactgaaagcatattgttactttaatttattgcggttgtttgctccggactatggagatggtgcggagaaagacggaataatattgaaagaccagtttaaactgggattcctgaaacgttcgagtattgaagagtgcgtgaaggctatccgtactatgctgaccgaagctacggaagtggataataatcctgcggaaatttactggttttctcagataagtggttattatttatgggctatgctggaattatattcccgaaactacgatcaggcgatcatttatgccggaaaggtgatggaggcgaaaggaggatatgatgtgcttggagaatcagtctatagtaagttttggggaaatgaggcatgtgcagagagaattttttctttgttcactaccaattcatattataaggatatcaattatgatcgtaacaaaggcgatcacttgactttgaattcagctttgttgaatctttattccgaaggggatattcgttatgaaaggactgtgtatccgttggagatggcaggagaaacgggtggggtggttatagcaaactgcctgggaaaatataacaaaatgaattgggaaaagaaagaaatacaatatatccataaatttagggtagccggagcttgctttatcttggcggaggcgtattgtaaggatggaaaggaacatgatgcacaggcgatagaagtgatgaataattatcttgcacagcggcgggctactttagtggatacacagcttactggtgaccagttgttgaaagctattctgcaagagaaatggaaagaatttgcaggcgaaggagaacgctattttgatttgaagcgctatcggaaaagtatccttaccggatggaacagtaatatgaaagataaacgagtggaaaaggatgattaccgttggacttttccaataccgaaagcggaatatttgtataatgaaaatgtatcacagaatgaggggtggactaaaattgaaaacaactaatagtataacaataaatttaaatgagaagaaaatgaagaaagtttttatttatgctatgggaggaattattcttcctttcctggcttcgtgcggggacgataaaaatgagactaaatatgaaggtgtgaacaaaatttatctgtcggcgcaggatccggtgatagaagagatggaagatacaccactgaccgttagtgtggatttgacttcggcttgtgagcaggatatgtcttttaacttcaaaatcctgaatgatgaagatggcatcttgaagttggaaaataatcctgtagttattccggcgggaagcaaatctgctactttccaagtggtatccaatcagaaagaattgcttgtagaagatacctactttgatattggtatatccgaactaccttcgtggaatatggaattgagtgctgtgttgaaggtacgtgtaaagccgaatccacagattccccaactgacggaagcacagaaggcgttgattgagggttataagacgaagtatgggattgacttaaacgaatggctgggagttgtttcttgtcacactaccgtacatagtccggcagacggttattcggaagcttttgctgcagcttttaccaaagaatatgatagaaaaacgattatcacattgagtgaactggctacagcagaaataccggtactaaaaatggtggatgatccaatgggattgacggaatatctggcttgggtactgcgaaaagaaacggtcgagaatacggagttctggtatggggaatatgccagtcccagctatgcaatgatcatgaatttgctgaactggaacagggagaatccgggaactctgacaatgtctctggataacctcagattaaaagaactgtcagacgggacagctgatgttgagtttatagggataaagactaatgtatatggagagtctgttcctgttgttccttttgaatttgtgtttactccctgggagttacagaaacaaaagattaaagaaggcaatcctgatgctatagacctggaagcacaggatggaacggcgaatcctgattattatctcctgcgtacttctgcaataaaagatgaatttggggatgaggcaaattttatagagcctaaaggaaatttcaattttaatgcaggtggcaagatggtatttcaatttgtaatggatcattctttagcaggaggatatactcgtgtacaagtggaatatgcaaagaagtaaattaaggtctattttaatggcggctattttcatagtctccatgtctccccttattgtttatgcacagacaagcttcattccgcttccggcaggaacgctggaaggtcgcttgcccaatggattgcgttatctgattttgaggaattcttctcctgcctcccggatcgaatttcgtctggtgatggaggtgggctctgtacaagagaccgaacaggagaaaggatgtgcccattttttggaacacgtagcttttggcggtacgactcattttcctaaacgttcgttggtggaatacctggagtctttgggaatgaagtatggacaagacatcaatgcctttaccggttttgaccgtaccatttatatgtttgctgttccagcagatcatcagaaagaagaagtcattgatcgttcgttacttatcatgcgtgattggctggatggcatttccatgagttcagagaaagtggagaatgaaaaaggaattatactggaggaactgcgtggttatgatttgggagatgatttttattcgttaaagataggacaggggatattcggacaccgtataccgttaggtacagtggaagatatccggaaagtaacgccacagatattggagggatattatcagaaatggtatgtaccttctttagccactttaatagttgtcggagatatttctcctcaagacatagaaattaaaattaaggaaggtttttcttcattgcaaaagcgtccggtgaatggtttccgaacctatccgctggaatatactaaaggtatccatttatcggaaatccgtgattcgttgcagactaaaacgaaagtcgaactaatgattccgcatccttgtgtggtagaacgtactatggaagatgcagtgatgaaacagatggggagattgcttgtcagagcagtttcttcccgttttcaaggacgaaaattgaagactagtgtttcagatcagtggtatctaagtgacaagaatcatttggtcttaacagtggaaggacaaaacaggagtgagttattggcggcgatttctgctaccgtagccgaattgaatgagttgattcgtcacggatggcaagaggaagaattggaagatataaaagatgatttttgtcatcagatgcagtcgggtactggcaatttatcacgttcctcttctgcatggtgtgatgactttgtggattatgtgatatcaggcgaccggtatcttacggatacaacccgacaggaacaactcaaaaccgacataagaaaagtggaaggtagctctttacaggctttgttgaaagaatggctttcttattataaagaaactctgctggtaggatgtagcagccacaccggattaggtgctccgttgacgaaagaggaaatagctgatgcatgggcacagggagaacagacagaatgtactgcttactcttatgtccgtccggatagaaaggaggaaacagaaatagctacacctccttgtcttgcgtcacgtcagttttttgattcaacttttattgcccgtattgtagaatatcctcacacacggattcgggaagtggaactaaaaaatggaatccgcttggtactgaagcctacacaggaagcagatacagctttgcttctgacctcttttgctccttttggaacttcctctttgcctgatgaaaagtatcctttgctggaaggtatcggatatatggatatgggaggcattgcaaaagtagacggagagatgctttcggattatctttctcaaaaagaaatttcgctcacgatggcgatggagaatcactggcatggtttcataggtatggcctctgttgcccatgctccggagttttttaatttgatttttgaaaagatattcgatccggaacttaaatatgatgattttgaagagattcgtcaggaattgctgaaggattatggcaaagaaactatgctggaaaaaatgctgaagcgtgctccggaccgtttgctttctgcccgtatggatgaattgatgggagctgccataccccgttcatccaataaactttccattgatcagatcaagagtcagaatctggattctatcgctgttttctataaagaactttacgcacgccccgaaggaacgacgtatgttatctgtggcaattttgatacggatactatcatgcggcagtttgtatctgtgttcgggaggatccctgcttcgttgtgtccatcggagtattcttatcctcattttgaacttccggttgaaaaacatatagaaggttttccgaacgataatgagacacagaccttatttgattatcttttcttcggatattatcaaccgggtctgaagagtacgttaacactgaaactgatgcgtgatgtgattcgtaatcgtttgatttccgtgcttagggaacgtgaatcattggtttattcgccttatatatcgttgatgtatgagggaattccctggcggacattctactttgatatcaatgcgtctgctgataaccgtaatatgcccgaaatagatattctgttgaaagagatattgcataaactgcagttgcaggaaataggagaagaggaattaagaaatatcaaacgctcttttctgatagctaaacgcgaagcgttgaatgaagaagctcctgccaactggcgtactaccttagtcggattactgaagaatggagagtcgttggctgatttcgagcagtacgagcagtgtcttgagagtattacccctgctactttgcgtgaggcgtttaacagctatctgagtcttgaaaattatagtctgctatatttaagtaaaaacaaactgaaaaatgacacaaagaataattaaacggttgctatgcctggtctgtttgtgtggctgctgtctcggtgtggtatctgcacagggagatatgaacaaacgcgcttacgtattatttgataataccggtaaggagattacttacggagagttagttaagcaactctccggttatgacattgtctttctgggagaaatacataactgtccgattacgcattggctggaatttgagatagctcgttcgatgtacgctattcataaagataagctgatgctgggagcggaaatgctggagagtgacaatcagctgattctggatgaatatatgcaacgtcagatttcttatgatcactttgaggcagaagcccgcctgtgggataattataatacggattattatccggtcgttttcttcgctaaggaacatggcattccgtttgttgcaactaatatcccccgacgttatgctaatagtgtgaaaaataaaggaatcgaagtacttgattctttgtcagatgaagctaaaaggtacattgcacctttgcctgttcctttcgaatataatgagaaagaaagtgaagcggcttttagcatgatgaatatgctgggaggaaagcagagcggagataaccggaaactggctcaggcacaagctgtcaaagatgccacgatgggatggtttattgctcataatatgaaagataagtttctgcacatcaacggaaactatcattctgacttcaaaggtggaattataccttatttgcttcgttatcgtcccggaacaaaagtagtgacagtcacttctgtacgccaagaatccattcatcaactggatgaagaaaataaagaccgtgcagacttttatatttgtgttcctgaagatatggtgaacagttattaaggcagcttgtctttttaagtgaagataataaaagtctctataaaatagctttatggagacttttttgtacctttgcgcccttaaactaactaacctttaaaaaacatgtttactgacttattgcattcctcttatttctcgctctttctgatagtagcgttgggatttatgttaggaagaattaagattaaggggctatcgcttgatgtgtcagcggtgatctttattgctcttctttttggacactttggtgttattattcctaaagaattaggaaacttcggtttggtactttttatttttaccatcggtattcaggccggtcccggattcttcgactcttttcgtagtaaaggaaagacgctgattctcattactatgcttattatctgttctgcctgcctcacggcagtaggtttgaagtatgcgttcgatattgatacgccgagtgtagtcggattgattgcaggagctttgaccagtactccgggattggcggtagcaattgatagtacccactctccgttagcatccattgcttacggtatcgcttatccgtttggtgtaatcggagtgattttgtttgtgaagctgcttcccaaaatcatgcgtgtaaatttggatcaggaagcccgtcgccttgaaatagagcgccgcggacaatttccggagttgggcacttgtatctaccgtgtcactaatgcaagcgtattcaaccgtagcttgatgcagatcaatgcacgggcaatgacaggtgctgttatttcccgtctgaaacataaagatgaaatatccatccccaccgcgcatacagtattgcacgaaggagactatattcaggcagtaggcagtgaggaatcactgaatcagctgtctgtattaattggcgaacgtgaagaaggtgaacttcctttggataaaacacaggaaatcgagtccttactattgaccaagaaagatatgatcaataagcaactgggtgatctgaatttacagaaaaacttcggttgtacggtgacccgtgttcgtcgaagcggtattgacttatctccgtcaccggatttggctttgaagtttggtgataaactgatggtggtaggagagaaggaaggcatcaaaggagtagcccgcctactgggaaacaatgcgaagaaactttccgatactgatttcttccccatcgcgatgggtattgtgctgggggtcttatttggtaagttgaatatttctttctccgatacactgtcgttttcacctggattgaccggaggagtattgatggtggcgttggttttgagtgccgttggtaagacagggcctatcatttggtctatgtccggccccgccaatcaactgttgcggcagttaggtctgttgcttttccttgctgaagtcggaacctctgccggaaagaaccttgtggctacttttcaggaaagcggattactgatgttcggagtgggtgcagctatcacagtagtaccgatgctggttgcggtaattgtaggacgcttggtattcaagatcaacatacttgatctactgggaaccattacgggaggtatgaccagtactccgggactggctgctgccgattcgatggtagacagtaatattccaagcgtggcatacgcgaccgtttatccgattgctatggtattccttattttatttatacaggtgatatcttcagctgtgtattaatgaaaatcagtatatataggtattgattgttaaaataatagtttgtatctttgccgcctcaaaatttaagatgaggtgaaacgattgtcattgaatatcatgcgctgtttcttgccggtactgtttgtatcgtatttggtaagtatcacattctttgctcacatacacgtggtcaatggcgtgacaatcgtccattcgcatcctttcaagaaaggggcggcacataagcactcaacagtcgaactgttattagttcatttcctgtcacatctgacaacggacggtgaggctgttgtgtttgctctctctctttttattccattcctcttgtggcggttgcatggtattacgcagcatacgcactactattctccctatcatggggtggtggcactcagagcccctcctgctattcgtttttccgtcatttgaaccgatggtatcctgctttatggtaaagcgggaagtcctcatctgtttgttcacatcatcacttaacgaaaatgaataacaaacgaaaaatgaagaaatacatcttttcgcttgtctgcttgtgctgtgcattgttgcctgccctcgaaggacaagctgctctccatgagcatcccgaatatccggatttacgtaaatcggatgcaaacatcgtaggtcatatccttgataaaaacaccaaagaacacctgccttatattactgtggcattgaaaggtacaacgatcggtactgtgaccgatgctaccggacactactttttgaagaacctccccgaaggtaacttcgtgcttgaagtcagctcagtaggttataaaaccgtaagacgcaatgtaacactgaagaaaggccgtacgctggaagaagattttgaaatagaagaagatgcggttgccttggacggcgtagttgtttccgccaatcgtaacgagaccacccgtcgtttagcgcctactttggtgaatgtagtcgatatgaaaatgtttgaaacgaccaactccactactctggcacagggattgagctttcagccgggagtacgcgtagaatccaactgtcagaattgtggtttccagcaagtacgtattaacggtttggatggtccttatacacaaatcttgcttgattcccgtccgattttcagtgcactttcgggtgtatatggcattgagcagattcctgccagcatgatagagcgtgtggaagtaatgcgtggaggcggttcagctttgttcgggtcgtctgccattgccggtacaatcaatattattactaaagagccgattcgcaattcaggaatgttgtctcataccattaccggtattggagatggagacgctttcgataataatactgctttgaatgcctctcttgtaacggacgatcagcgtgccggtttatatatctttggtcagaaccgccaccgttcggcatacgaccatgatggagacggatattctgaaataccgaaaatacatggccagacaatcggtttccgttccttcctgaaaacgactacttattcaaaactgactttcgaatatcatcatatggaagaattccgcaggggaggagacttactgaaccgtccgcctcatgaagcgaatgtggccgaacagacagaacattccatcaatggcggtggattgaaatatgactatttctcaccaaacgagaagcaccgttttaatgtgtttgcatccgcacaacacatcaatcgtgacagctattatggtggcgggcaggatctgaatgcttacggaaacactaccgacctgaactggatggcaggatcacaatatgtctacagcttcggaaaatgtatttttatgccttcggacctgactgccggaatcgaattcaaccaggataagctggaagacaatatgtggggatatcaccgcacggtagatcaaaaagtaaatatcggtagcgctttcctgcaaaatgaatggaagaacgatcattggggattcttgcttggcggtcgtctggataagcataacctgattgatcatattatattcagcccgcgtgctaacctgcgtttcaatcctacccaaaatattaacctgcgtttgagctattcttccggtttccgtgcaccgcaggcttttgatgaagatttgcatgtggagaacgtaggtggaaatgtggcaatggttgagcttgcaaaggatctgaaagaggaaagatcacagagcttaagtgcttcagcagatatttaccaccgtttcggtgcattccagattaactttttggtggaagggttctatactaaattgtcggatgtctttgcattgactgatggcgaagtaaaagacggaattctgacacgtacacgctataatgctcccggagcacgtgtgatgggactgacactggaaggaaagatggcttatctgaataaattccagatccaggctggggctactttgcagcagagccattacagcgaaccgcacgtgtggaacaaagaagctccggcagtaaagaagatgatgcgtaccccgaatacttacggctattttacagctacttatactccggtcaaaccgttgtctatcgccctttccggtacctatacgggttcgatgctgatacctcacgaacctgttcccggattcctcgacaaaccgattacggtcaatacggaagacttcttcgatatcgctctgaaggcggcatacgacttcaaactctataagtcgatgaacttgcaggtgaatgccggaatacagaatatcttcaatgcttatcagaatgactttgataagggagccgaccgtgattcgggctatatttatggcccttcactgccgagaagtttctttgctggagtgaaaattagctattaataatggtttaataatctttttagcttataaatccttataaatggggattgtttcggaaccggacaatccctatctttgccgcagaagataaaccttatcttcgctgcacaaaaactgacgaatgaaacaaatatacctgaatataatgaagtggtttttgcctgtactgtttatttcgtacatggcagggattactttgtttactcactcccatgtggtaaacggggttacgattgttcattcacatccctttaagaaaggtggcgaacatagccatacgacagtagagtttcagctgattcacatattggaccatacattggtgacagataatggtttgacacctttgtttgtgacttctgtcctgtctcttttatgtatttttctcgcctctccgcagcgtatgcggtattgtcgtccctgtccgggcgccatttctctcagagcgcctcctgtcgtttagtctgcatcacgtagaagcaggcaggtcttctttggaaactgctgttgcttcccatccttattatttttgatttaaaacattaaaagactaacgacaatgaaaaaatatcttttagtcctggtcagcctatgttgtgccttgttgcctgcattggctgaacatccggagtatccggaattgaaaaaatctgatgcgaatataattggtcatgtattggataaaaagacaagtgagcatctgccttatattaccatagcattaaagggaaccactataggaaccgtcaccgacgctaccggacactacttcctgaagaatctgccggaaggaaactttatgatggaagtcagctcggtagggtataagacggttacccgtagtgtgaccttgaaaaaaggtaaaacgctggaagagaactttgaactggaagaagatgcgattgctctggacggagtagtcgtctctgccaaccgtagtgaaacgacccgacgtctggcaccgactctggtcaatgtagtagatttgaaactgtttgaaaccactaattcttctacattatcacagggcttgaattttcagcctggtgtccgtgtagagactaactgtcagaattgtgggtttcagcaagtccggatcaatgggctggacggcccctatacacagatactcatcgactcccgtcccgtgttcagtgccctttccggggtatacgggctggagcagattcctgccagcatgatcgaacgtgtagaagtcatgcgcgggggtggatcggcattgttcggctcttcggccattgcgggaacgatcaatatcattacgaaggagcctctgcgaaattccggtcagttatcgcatacgatcacttccattggtggcagttccgcattcgataacaacacctcgctgaatgcttcccttgtaacggacgatcatcgtgccggattgtatatcttcgggcagaaccgtcatcggtcgggatatgattatgacggagacggatttacggaacttccgaaactgaagaatcagacggtcggtttccgttcttatctgaaaacgagtacttactccaaactaacgtttgaataccatcatatgcaggaattccgccgtggtggagatatgctggatcgtcctcctcacgaagcccatattgccgagcagttacaacactccatagatggcggaagtctgaaatacgattatttctcaccgaatgaaaagaatcgtttaagtgtttttgcctcggcagccaatacggatcgtgacagttattatggtcccggcaacgatcctctgaaagcatacggaaagacgaccgacctcaccgctatgggcggtgtgcaatatgtgcacacattcgacaaatgtcttttcatgccttccgacctgacagcgggactcgaatataaccgtgaccggctgaaagataatatgtggggatacgaccgccatacggaccagacggtcaaggtttacagtgcttttctacagaacgaatggaaaaacaagcattggggaattttgattggcgggcgtctggataagcacaatatggtggatgatgttattttcagcccgcgtgccaacctgcgtttcaatcctacggataatatcaatctgcgtttgagctattcttccggcttccgcgccccacaggcatttgacgaagatatgcatatcgaaaatgtaggtggaacagtggcgatgatcgagcgtgcaaaggacttgaaagaggaaaaatcgcagagcttcagtgcatccgcagatatgtatcaccgctttggtgcttttcagactaatctgttagtagaaggattttatacgaggctgactgatgtgttcgtgttaggagggccttttgaccgtggtgacggtgtgctggtgaaaatacgcagcaatggtccgggagccaaagtaatgggattgactctggaaggaaagattgcttatctttctttgcttcaaatacaggcaggactgacattgcagcgcagccgatacgatgaaccgcataaatggcacgatgatgcgccggcagaaagaaaaatcttccgtactcccgatatctacggttattttacggctacttatactcccgtcaaaccgttgtccattgctctctcgggtacatataccggcagtatgcttgtgcagcgtatggacatcagcgcagaaaacgtagcaatgggcgatatgcccgagcgaaaggcggaagccatccgtacaccccggttcttcgatatgggagtgaagatagcgtatgacttcaaactctataaaacggtagacttacaacttagcggaggtgttcagaatatctttgaagcatatcagaaagacttcgacagaggagctaaccgggattccaactatatctacggtccttcgcttccgagaagtttctttgccggagtgaagattagttattgatacgataccggtctgttattttcagaacattttatgcatccgggaatgtgataaaacgattgcttcccggatgttttataaataagcgacagatttggcattgatgatttcaacgataatcatgtctgcctgaccgatttttagtatttttggcgattgtaagtaagcgattcaaagtcttatcagattgtattacggattatgataaaaagaagatggacgaaatgcttcattattacgaatgtaaaggcagtaaaataattagtttgaatgacctattatggcaacagaaaataaaataaagtattttgaaaatcgggaagactggagaaagtggctgatggacaactttgaaaccgaagacgaaatttggtttgtatttcctcttaaatcgtcaggtgaaaaaagtattgcatacaacgatgctgttgaagaagccctttgtttcgaatggattgacagtacgataaaaccgcttgataaagaacatagaattcagcgtttcacgcctagaaaacctaaaagtacatactcgcaagccaacaaagaaagacttaaatggttattggcaaataaaatgatacaccctgaatttgaagataaaatacgcacagttttatctgacccttttatttttcccaatgacataatggacagattgaaagaagatgaaatagcatggagaaactaccggcatttttccgacgcatataagcgtatccgaattgcatacattgaagcagcaaggaagcgaccggaagaatttgaaaagcgattaaacaactttatctgtaaagtgaaagagaataagatgataaccggatttggcggaatagagaaatattattgagattgtccgaatctttatggaagaatatccttatagtctgatggaagcgatggagcatcattagtagtaaatcactaaaaacttttctttcccttttagtagtttgcctgtttgagttgtattatatatagatagtcaataaaagtcaaagtaatcaacttattaaacagttaaccttatgttcaaacaactaagtacttctctactgattgcatcagcatgtattttgtcctcttgcacgcctacggtgaagcaggagattgcaattttacctacccccgttagtctgacggaacagtcgggtgctttcgtcttaaaggatggaatgaaaatcggcgtttccgatcagtccttatttccggctgccggatatttgcaggatattcttcggaatgtggtgtctacttctgtagaggtgaccgaagccgataaggcggatatctatctccagctagggcaggataatggaaagcccggctcttacaaacttcaggctacccccaagtctgttcaggttgaagccggagattattcgggtatcgtttccgccattgccagcctccaccaactgctgcctgccggaatagaagtgcagggaacgaaacagactttctccattcctgccgtgcaaatagaggactcgccgcgctttgaatggcgtggttttatgctggatgcttcccgtcacttctggaataaagatgaagtgaaacatgtgctggatctgatgtccttatataaactgaataagttccactggcatctgacggatgatcagggatggcggatcgaaatcgagaaatatccgttgctgacggaaaaaggagcgtggcgtaaatttaacaagcacgaccgtggttgtatggagcgtgcggtagaagaggacaataccgacttcctgattccggaaaacaaaatacggattgtagaaggagatactctgtatggtggttactatacgcacgaagatattaaagaaattgtagattatgctgcacagagaggtattgatgtgattccggaaatagatatgccgggacatttcctggctgctatcacccaatacccggatctcgcttgtgacggactgatcggctggggagaaacattctcttctcctatttgtccgggaaaggatacgacgctggaattctgtcaggatgtctttaaagagattttcgatctctttccttatgaatatgtacacatggggggtgacgaagtcgagaaaaataactggaaaaagtgcccccgttgccagaagcgaatccgcacggaaggacttaaatcggtagaagatttgcaggcatggtttgtgcgtgatatggagaaattcttccttgccaatggaaagaagttgataggctgggatgaagttgttgccgacggactgacttcggatgctgctattacctggtggagaagttggtcgaaagaggcagtgcctatggccacttcgcaaggacaaagagtgattgcctgcccgaatgaatatttctattttgattatgcgcaggataaaaactccgtgaagaagatattggcatacgatccgtatgcagacgaccgcttgtcacccgaacagaaagaatgtttctggggcgtgcaggctaatctctgggcagaatggattccgtctatgaaacgtatcgaatatctgatacttccccgtatggtggcgttgagtgaaatagcctgggtgcagccggaggcgaaaccggatctgaaagagttctatcgtcagcttgttccgcatttcaagcggatggatatccttggattgaactaccgggtgcccgatctggaaggattctacaaagtgaatgctttccttgatgaggcttcggttgatctgacttgtccgttgccgggcattgaagtccgttatactactgacggaagtatgccgactaagcaatccactctttatgaaggaaatctgaaagtgacggaaacgacagattttactttccgcactttccgtcccgacggtactccatcggatgtagcacgtacccgatacgtcaaagctccttatgcggaggcaactgctgctccggcttctttgaattccggactgaaagccgtatggcataaattccgtggtaatctttgtgcggatatcgatgcggctcccgtgaatggtgagtatgtcgtagaatccgtttctatccccgaagaggtgaaaggagatatcggcctgataatcacgggttacctggaagtacctgccgatggcatctatacatttgctcttctttcggacgacggcagtacgctgaaactggacggcgaattactgggagataatgacggagcacactcaccggtagagattatagtacagaaggccttgaaagccggactgcacccgatagaagtacgctacttcgattgcaatggcggagttttgcagatggaattagtcaatgaaaagggtgagaaagaagtgcttcctaaagaatggctgaaacatgaataaacagatctcctgaagattttttattaggtattaatatagatgaggtaattcttgttgaaatatccctataaatgggtatttcccaaatcaaaagttcttctcaactttgcagagtgaataaaacgccactatgcaatatttgaaagaagacatacaggaaaaaatcctccacatagccgaagaagtattctccgaaaaaggatataaggatgcttccatgcgcgaaattgcttcccgaacagggattacagtcagcaacatctatcattatttcaccaataaggatgagatattccgcacgattctgaaacctgtgctgaatgatttgtatgccaagatatatagtcatgatgccaatcagatgtccatagaggtttttacgaattcggactatcagcaggaatccgtgcaggaatatatcgatttggtttccgaacaccgtgcccggttgcgtatgttacttttccaggcacagggatcatccctggaaaacttccgttcggagtataccgatgcgatgacacgtactatctttgtcttttttcaggggatgaagcagaagtacccgcacctgaatataggtatcaccgatttctttattcatctcaatacggtatggctgtttgccttgctcgaagaactggtgctgcaccacgtgaagaaagaagaaatgcagaaatttatagcagaatatatagcctttgaaacggcaggttggaaggagctcatgaatgtatgagctccttctttttttgaacgattcagaggaatgttcttttttaaaaatcagatatatataaatgaaaaggtatgaaagaaaaacagagaaagaaaagtggtgtgagtcgcttgtttgagatagcaggtgagaagaaaggcttactgatgcttgccggggtactttcggcggtcagtgccttgtgtatgctggtgccttattggtcggtatatgaagtgctgaaagagcttttgttgcatggcagcaagataagcgagttggatagcagtgtgcttatacactggggatgggtggcatttgtcggtctggtggcaggactgcttttactgtatggagcattgatggcatcgcatgtggcggcgttccgtattctctacgggttgcgcattcgtctgtccgggcatatcggacgcctttcgctgggatacctgaacggtacttccaccggagcgatcaagaagactatggaacagaatgtggagaagatagagaattttgtggcgcataccattcccgatctggtcaatgtgctggcaaccattgtgctgatgtttatcatcttcttctccctgaacgggtggatggcggctatttgtgtggtctgcatcgtttgtagtatcggtttgcagtttatgaacttctttgggaaaaaagccaaagagtttacgaaaatctattatgatacgcaggagcgtatgagtgcttcagctgtccagtatgtgagaggaatgcccgtggtgaagatatttggtcagagtgtgcgctcgttccgccagtttaatagtgagatagaggcctataagagttatgctttaagagtctgcgacacctaccagcccggtatgattgcttttactgtattgctgaattcgctgataaccttcattttgcccgtaggtctgttgcttctgagcagagagacgcagaatattggtctggcggcagtttatctcttctttattattatggggcccggcgtggtttctcctatctataaactgatgtatctcggttcaagtacgaacgagattgacgagggagtgaaacgaatcgaccgcatatttgatgaacaggtacttcccgaaactgcggtttcgcatttgcccgcttcctatgatatcgagtttcgtcacgtatcgtttgcctacgaaaacaaggcggagactacccgtaccgaagcgctgaaagacatctcttttactgcgccacagggagcgattactgcgctggtcggtccgtcaggttccggaaagtctacggtagccaacctgattccgcgcttttgggatgtcagtgaaggggagatctgcattggcggaattaatataaaagagatagcgaccgaggatttgatgaatctcgtttcctttgtttttcaggacagctttctcttctttgatacgctctatgagaatattcgggtcggtaatacgtctgctacccgtgaacaggtgatcgaagctgcccgtgcggctcaatgtcacgattttatagagagtctgccggacggctatcatacgcggatcggtgacaaaggagtgtatttgtccggcggtgagtcccaacgggtttgtgtggcaagagccattcttaaaaatgctccgattctggtgcttgacgaggcgactgcttttgccgatccggagaacgaatataagatgcagcaagccattcagcaacttatcaaaaataaaacggtcatcattattgctcacagactttcgtccatcatttcagccgaacagatacttgtcctgaaagaaggcaagctcgtacaaagcggacgtcacgaagtgctgagcaaaacggacggtgtatataaaagaatgtgggatgcctataccagcgcattccgttggcaattaactatcaaaaaggaggaaacaaaatgaatgcaatcaagaatattacggtaggacataccgaacgtctgcgtaaacctgtcggttacacgatgcttgccaatctggtgaatatcgttccgttctgtctttctatcgaagccataaatgtgattttccgtacgtttgacggtagtggtacaccgctggatacgaatcgtctttggatgatttttgctatattggtcgtgtatatggtggtgatggcttttgccgaacgcgccgcctatcgtgccaactttcgcggtgcttatgagatgagtgccgaagggcgtattaatttagccgagcatctgcgtaaattatccttgggattcctgtcccgcagagatccgggggatctttcttccatgctgatcactgactttaccatggcggaaacgggaatatcccatcacttgccccaattgatgggagcgttggtaatgccggtttttgccttccttggcttgctttggattgactggcgcatggcggtggccatgttcgtagctttaccgcttgcggttgctgtcctgttgcttagcaatatcgcccagcgtaagctgagtgtgcgacagattgaagccaagattaatgccggaaaccgcttggaagaatatctgcaaggcatacgggtgatgaaagcatataatttgctgggaggcaagttcgaacgcctgaaaatggcttttagtgatctccgtcgtgcctgtatccggcaggaggcgcttctcggtccatttatcttattctcggtcacattgattcgtgccggattgacattcatgatactttgcggtacgtacctgttgataggaggcgaactttcactgctcacgtttgtcatgtttctggtggtcggttcccgtgttttcgatccgctgacatctgccttgactaactttgccgagtttcgctacttctccatcgcaggaggacgtatccttacgttgatgaacgaaccggaaatgaagggagatcgtgatgtgcccgaaagcggagatattacttttgatcatgtatctttcggttatcaggaaaaggaaatactgcatgatatttccgtgactcttagaaaagggacgctcactgctttggtcggtccttccggaagcggaaagagtacgatgctgaaactttgcgcacgcttctatgatccgcgtaaaggctcggttcgttttaacggaatggatatgaaagaactggagccggagtcattaatgaaacattgttccatggtttttcaggatgtctatctgtttcaggatacgctgaagaataatatccgtttcggcaggacagatgctacggatgaagagatcgtagcggcagcgaaaaaggcttgttgtcacgaattcatcatgcgtctgcccaaaggatacgatacgatggtaggagaaggtggctgcactctttcgggaggagaaaaacaacggatctccattgcccgtgccatgctgaaagaagctccggtcgtgctgctggatgaggctactgcctctctcgatccggagaatgaagtagaagtgcagcaggctatcaataccttgattgcgggacggacggtaatcgttatcgctcaccgcctcaaaacgatccgaaatgccgaccggattattgtgctggaagaaggacgaattgcggaacaaggcactcatgatgaacttttgagccggccggggctgtacgccaaactttggaatatacaggaacagacatcgggatggaaactataaaaacggctcatcagagataaaacgaaaaggtccggctttcacaagccgggccttttgtttactagaatttatgctatttacacttattctgtaatattgaatacattatatggtttttttaaactaacaaccaaatgtgagaatgcgggagaatcacttcggccgattccaatgttttcaatgtggctacgtaatttttaattatgactaattaattcaattctgatattgcaaagataggggctttgacgatttcctgcaatcacctgaaatgggtattcttgggcgggttactagcaatatatagtgggtctgaatcttttattccggaacatttgcagagtttcctgtcaacctgttcagatgacataccagtagttttccttcattatctctcaaatgcataccattgccttgacaataacggaagtatttgcatcgggcgcactcgtcttttttcatccatgaacggtcgcgataaggctggaatttcgtttgccatatttcccaaaaatcatcctgatagatatttccttgatggtagttggagcggatgctgctacaggcactgatagaaccgtcaatcaaaacggagccgactgatattccggcactacagaagaaaggagtattccgtacttcaccttcatagttacccaggaaaccttcgcagccgtaactcgcacggataattccttcctttcgggtgtcacggatgaagtcgagtacttgtttcagttcttctccgttcatacggaattccggttcttcggcggctcgtcctaccggaaagatggtagatactctccatcgtttgactccgagactgataagtaactctttcatagccggcaactgtggcaggctacggcgggtgacacaggtaatgacgtcgaatgtcagttcagggatagctgtgatttcccgtatggcatttacggcacaatcgaaactttcgggatgtcgtcgcatccagttgtgtacatccttcagtccgtccaggctgatggatatactacgcataccgctgcggatcaggttgtgaagccgttcgcgtgtgagacacaggccgttgcataccatgccccacgggtatccccgtcgggatatttctttgccgcaagtttccaaatcttcacgtacggttggctctccaccggagataatgacgaatacatcgtgcggattggtatgtgttgctatgctgtccagtacttttagaaaatcctgcagaggcatatccggagtagcgggagaggacttgcagtcactgccacaatggcggcaacgtacattacatcgtaaggtgcattcccaaaaaagctgtctgagcggatgttcttccactctttcgtgtttcatccggcgaaatatttctaaagccagccatcggcggggagtaagggggatgatacgtttcattcttcttcttttttctcctctttaagtaaagtgacttttccctcttttccaaggtcttgtattctaatcttttttgtctggtatgcgccattcttttcgccgtctacatctgtatactcaaggtacatttcagatttttttggaggatactcttcgaatttaaatgtattgattgctataccgcctaccgtataatgctctatttcacgtgactcggtataggcagtatctgtaattaatgaatcttcttgattcatataactggatactacgcgaataccattaatattttctttttcttcattttgtacttgactgcttattataatgtcaggagtccagtcgggaccgggaccataataacaaggttcgtcccagatttcgttattattgccacatccggaaaagcctaaagcggcgagcagacttagtagatatttgtttctcatgttattaacgtgtttagttcttgttgggacaaagataattaatctttgaatcggttgttctctattgttcgttttattttttgaatgagatgattttagagattggggatgattgtataatggggtatcaggaaatacaatcttatgggataaaggagaaaacatcttgattcttttgtgggtaattaaacaaaaccgtattaaatggggacaggtatttatccacaggatgtgcgaattgatattctccccttttcgcatatattgggaaaaggtatgtgtaatagcaaaaagtgcaatactttctgtgatattctttctttttgatttgatttaaggtaatttcctgtcgttgtatgttgtagaataacctcaaatagcgattccctgctctctgaaaggagttcttctactcccggcccggctctcagagtgcttcagcacggggcttattagcgtgaagagtaaggttagacaagatatagagtaagtatacggtgcatatagtgtaagtatacggtgcgtatagtgtaactatagcctgcgaatagcgtaactataccctgcaaatagcgtcagtatcctgaaaagaaggtggaaatagactgttttttgtcttttccctttctatttcgttcatagacttgaacgaaatagttagagcagaagggaagactattggctaaattgttcgcttagagaaccggaacgagaaagatgaaggtgcagagtgatatcataattgctataaaacttcgatattgataaatcgctgattgcctagaatccgataaaaattccgagggtagagaaggggcggaattagcgaaactctgagcattacaaaatacaaattgtcacttttgacaatttgtattttgtttcttggaatgaacgttaactatttgcatagctatgtattccacccaaaacataattcactccgaaatatgtcatcagaacagtgaggaatgctagtatcatataaatgtggaagaacaaaggcttgcggaaaatctgcagactctgtgaatggaatgccacaccatatacaaggaaagtaatcaatgcccagacttctttcgggtcccatgcccaatagcgtccccatgaaacatttgcccagactgcaccaagaaagatgcctgctcccagaaagaatgtggcaggataaagcaacaggcggctaagcagtgtcaattgttctacccgattatcctgtctttcatcccccccggtaatatggttttctgtttcttttttccgcagacatagtgccagtattccattcagcatgatgaaagccaatagagcataagacatcataatcagtgaaacatgaatgctaagccatggagaaacgagcaccggcattaaaggagtgatctgtggattcatttgtctcaaataagaaactaacagggcaaagccggaaagcaagaacccgaagggaagtgtgaaagggaagcgacgatggagcaggcaggccaccaggagtatacataatgccatgaattgcatcgtttcataaccattacttaggggaatgcgtccgccgatataccaacggaggcaatatccagccaaatgaaatagaaaagccgcataaagcaccacggaaaaagagactcctgctatatgtgaaactgttttgacttttggtggaagagctgtgctccgcaggcagttgtgaagcagaagcaggaaagacaacagtccaaaagccagattaaccataaagagaatcttgctgaatggaatactgttgtagagcaattcagctttcacttgtatctcggagagaggtttcacactgccatcggcaggtaatggctgaatgaatgtcccttgctccagcatgagaatgagtcctactttctcatctgtctcttggatggcttttgccagtttgctttgtccctgttcccgttgccaatgttcccgtaagcggtaaactgatccgtcgaataaatcagtgaggcgtgcgtaaggtgttttcaggccgagcaactgttgtagttctgcactttttatgtatatcagcgattcatttctccacacttcgggatagagtaaccagcctccgattacttgttcgggagtcagtcctttgtaggacgatttgcctgtcagcttctgaacaaagtcgcgggctaatgtattgaaaggtactacccggtcgtggtaaatcacttgttcgcgtgccaggctatctgcttgtatccgtttgagggcagggagtgatctcttttgcgcctgcgctgttccggcaaggcagaaaaggaataagatgaacactcctccttttttcagtaacggatgattcaacaagcgacggaactcaccgttttgagagaacagaagccagatcatggagatgcccagcagaatatatcctgcataagtaaccctcgtaccccatggatcataattcaccgtcagccaacttccctgcccgtcatcgtcgaaagacgactgatagaagcggaagccttgcgaagtaaatatgcggttcattgaaatttgttcatgaaagaaagtgtctttttgtccggagagagagtcagatagtgagacgggaagggaatgactgatataactgacgtaatcggcaggcgcttccgttcccggataatatactacccggaaactgtccagccgcatgataaacggcagttttatattctttccgctttccggttcctcgaaactattcattgctacgccggggcgcagatgtatatatcccttcttgctgccgataaacgtaatcatggcccccaccaggataacgaggaaggagccatgcaacaacaatatgggaagccgccgccataaggcacgccggatgagagcggcaagtgttattacggctatcgctccccataaacaacaaaaccagatcgtatgatatatatttctttccacaaagtccgtcccatacgcttgctctacgaaggtagtcacagcaagcaatcccaccagacagacatataaaataacaagtagccttttcaacagtacaatcttttggtgatattaaaaggaagcataatccttgtttttacaggctttcactcccatacattccatctctatcaaccatcccggacgacatacgggggcatgaacaaatactttaggcgtgtgcggaaagcgtttgtcgtacatacctttaacgacagtatagtctgtgatgtcacgcaaatatacgatcatctgtcccagatcatcaaatgtgcagtcggcttcttgcagtagcacctctacattctcccacattcgttcggtctgcttgcggatatcaccggggtgcactacttcacctttgttattgatgcttgccgtgccggaaatgaatacttggcggcgatctccatagtctacatacgtgccacgttcaaagctcactccgtattcgtaagtcgggttcagatgtgtgggcgcataaagaaagtgaatctgctccggtttcacgccggctatggcatacgtatccatttgtaccagtactttcgggtcggcatggcgtccgccaattcctgtgctggagatgtaatgtgtcttttctgtcaggttctgtgtcacaaagacctcattgcgtgctttcacgactccggcatagtttacgtctacgttctgcacgaagaaccaggtacgaatacaatgatctgccagtctgcatccttgttccataagttgcatcacgtaatcattcagcagcaggcgggtctgatactctgagttggctgcacggttgaaagcgctgccggcccaaagatggcggtacgcaccgtgcttcacttcgaaaaggccgttgtgcagtacttgcgtctgtatgtcggtttgcagataaacccacagggcaatctttgttccgtccaatggtggctgctccacaatggaaagtgcgcagtcggaaccttcggtggtcaaagccagcagcgtatctgcctgattggcagcatcgctcaggaaatagcgcttgaatacggcaaccccacctttgagttctttggcaagtaaattatcataagtattcaaaactgcattcagctgttcttcgtatgtatcttccggtttcgtggaatgtatcattacgtgatactccgaagctcctgcctctgcattatatttaaaaatctcagttagagtcttttcagactggatgttctgttgttctttgttgttcatatgcaatttttcaatgactaatagttctattttactcttgcgcaccgtcgtcaatccagttgtcaatcagtgtcaggatgttggatgaagtgaccatctgtgaatggtctatcccccagcttgaactgatattcgtattcaatatctggtgtaaaatgctttctttggcattgcggggtttcacccgtaacacatcgtttacgatggtcgaaggttggttgactaagtcttcatagctttctccggtcagcaaattcagttcggctgcgggcttggcacttcctccgtgacaggctgtacaggttttatcgaaaacctgttgctggatggtatgatacatactgacatcaatcgtgcctacttccatgaaggtagtgtcggcagttgccgtgaaatcttcgatggtctggaaactgacgacacgttttcgcagtctgttgatgacacatagttctatctcggtcacttcctcactgataccagacagtatcacttccacttcaccgccgtcggtctccggagtaggaataactttggaaacaatggcatactcgctctcatcatcgaaacctgccaccactatgctgtatccttcggaccatttgttgataccactgaatttgccggacagtttcagtacccgtccttctctcggtacgaaacctgtattttcataaatcctgccgtcgtcacaagaagtcaatcccgtgacaagcagggaaaaagcaaagaaaagaatgtatttcttcataaacagatcctttctcgcattagttagaatgtatattgaagtaagatactggctgagtgtacggctattcctaagtcatcattgtcacgatcgagctgtgtgtcatgacctgtacgaccaatgtactgatacatcgcctgtaacttgagattacagttcttaaagaaatagtttactcctacggcaggcatattcagaaagccatttgtatctgttccattccggttgaagaaatcatagcgcagtgctgcctgcaggcgcggggcaacgaagtacccaccttgtacgtatcctcctaagtaattgtaggagtcagaaatcttttgtcggttggtgaatcctatgttcatataatacatttcagcactcagatagagtttgtttttcagcattgcaaattcaagtccggcacggaagtcattggtactttcattttcgctttctacattcatcgaagcggatactccgaacatgattttatcttcatgcagacggttcggatttccctgagtggcgggcatcacgcctttgggcatataagtaaatcgcccggcatagagcagggaagggatgtgccaatcatcactcagcgtctttgtagccgtattgaccgaagcgcctgtgccgttgaacaaaccgatttcatagccaaacttgtcggcaaccaaaccgtgaatctctactcccagatcgaagccggtaccgatattgggcgtcaccgcattcagtgaatgggggagaataacaggggcagtaagcgatacaggcagtgatggcaagagtgtttcacccaatgtcgtcagataggcgtgtgagaacggggtcttgaacttgccgacacggatcgcaaattgttgtttcagctgtacgtcgaaccacgcttgctgtaacaaggctccgccactggctgcggcattcatggaaagattgaacgatacttttccaaaagctttccccgtgaaaccgagtacggcgtaagggatagaaaaaccggagttggctacattatcctgattgtaggctttgtccagtccttcctcgtcataccagttgaaattgccactggtctgtacaagcaaatagggtttgaatacaaagtctccttttttggtctcaatggtgaatccttctcttcctgccaatgaaactacgccgttttccgtatcttcttcatgttgtgccatagcgacgaaaggcaaagccgacagcatggcaatgaatatatattttttcataataactgatatatactgcttttttattaaagtgaatttataaatgcaatcaatgcgtcgcggtcttctttactcatctttttgaataagttttttgatgcttcgccttcgccgccatgccacatgatggcttcagtcaggttgcgggcacgaccgtcgtgcaagaagtaagtgtgtccgttcaccttctcttgcagaccaattccccaaagaggggtggtacgccattcgtttccacgtgccagaccgctgacataattgtcgttcaaaccgactcccatgatttcggatcccatatcgtgcaacaggaaatctgaataagggtggatggtttgtctgcccagccacggaagctgggtgttgttcagcagaacggtgccacggggtttggtgtgcagggtagttgtatggcagaggtgacattttgcttggtagaagttttgttctcctttgaccacctgcggatcattaacattgcgacgggccggaacactgaggcactgcatatagaggtctacgtcttccatctcctcggtggtaatatccagctgatcataggagagtcccatcatgcttccttggttgacttgtatttgtccttcgcaaatctcttcgggataacggctgttggtaacacccatgtcactggaaaaaccgagttctacagtaaggtcggcatgctgcgctttattgccggacaatcccagagatcttactccccgttcggtgatgtagttgcaacgtccgctgattccatattccggatagttgcttttcgctgcaagtgcttctatttcggtagggtccaatgccatcatttgtcccatacctacatggcgcaaggggatgcggacggtacaaaacaaatcttccggtttgatttcttcggcataccattcggatatggtgtaagtcggtttgcagagttcgtatttctcaccgtccgggaaggagaaactttcgtaggtatattctacagataattttccctccggttttacgccgtagattgcctggtcgtgcagtacccggccgtagtcttgaaaaaatgcaccattcttgcggctgatataaaccagcatggaagagaaaccatagctgccggaaccaccttcgctccataatgtcggtttggtacgaccggcattccgatgacagctaccacaggagtaaccggcataaacaggaccgagtccgccgccatgaccattaccgcttgtccgtacatcatcgtagagtctgtctccttgattgaaacggttttcatagacacccgacacccagtctgccggagtgtcgtaggctaatgatgagttcagaaaattggtagctgtacctgccgacagagcgtatccatccggtatctctatatccaagatgtcaattccgtcattatcgcaagcgctgcacgccaatatagaaaggagagagaatgaatattttagtatgcaattcatctttaattgactttatttaaaataatatgctcaaacataccaaagaagtaaaaggagatttagtcaatctcgcctttacttctatatgcttttatggggtaatcccttatttcactttacgagcctgtccgtctttgaagagcaggaattccagtgtgtggaaaccgcgtacattctgagcggctgcgataccttcgttgtcttcatcatagtcaccgctccagttcagctggtcccagtctcctgaattcagaagctgtacgatagcgttctggtctagtggccagctgtccatattcgggtcaagacccaggctggcaaccggaccaaacaagaaggcttcactgacttcccatggctggcgtgcctgtaaccaagcgtcacacgctgtttcaaaagctgtattggatggagaattggaaagagctatcactgcatcatataacgcatctactttacttttcagtgatgcgtaagtcggcaatacgactacttcaacgtaagtttttaccaccggctgaagtatggcatcagagttaatgcttgctgtacttccgatataagagttcaactctttcagtacagtttccaaatctgaacaggcttccatggcttcttctgcttccgaactgttgatgttgttgcggaaaggttgtggaataccccagatggcagtcgctgccttattgatggcttgttttacattgttgttcaatgttgaattgctgccttcgataatttttgagatagaattatcggcaacggttccatcaagtgttccgtaataagcattgcggatagaatagatgttatttctatagtcttcgcgggagtgccagctataccatgattctacggcataaattgcttcctgaatatttccggctttatatttgctcaccgggtcgcctattttctgtgaacctacttcaccggcaatatcaatacaaccttcgatgatttgctgtacacaggtcttggcagttgtgaattcaccgttatggttgataaaagcgtctccatatccgcctgttgtccaggctgcctgaaggtttgttgcatctgtttgcagaaggcggcctacatttttcatatagttgtgccagcttgttgcattctctgagttgtagtcgatatcagcagcagatacttcattatcatcatcattactacaggaagtagctgtaaatgccagtcctaacataagggctgcaacatagaaaaaactttttttcatcgtataaaaattaattaatagattgtttcttatttcttgataaaccatccgacataagcaatgccgatagagaattcgttttcgctgttgtattttccggttccgaatactttgcttgttccgatctgccgtgtcgagtagtcagcttttactaccagattagggagagcataccagttcaatccggctgtccacatactgacctgacaacgcttttccattgtctgtcctttttctcctttttcctgcggattgtagtattcgtatcgggcaaacggatagatcacaggaactttattgtttttgaaaagagaactgatgttgaaacctgcttcggctgcatagcttacagcattttttgcaacaggaattagccggctgtaaggagatttattcgattgtccgatattcactttactgactccggtagaattgcccagatttccataaacgatattaccacgtgcaattacatatttattgcggtattgtgcatctgccgtgaatattctcaacgggactttacttgaataactatcaagtttgtctgaattggagcccgcatcggcacaatagtagaatgacgcacctacacgcaaaccgggaacgcctttgtaatccaggcgtgctacataagccggagacgagaagttgtcttcttcaaatataccttgtttgccaccggctacccatgtgttgcggtcaaaaccattcggattcaaacctgccacaatcatggcctgataatcgaaactggcatacccttttccgaaggaaccgaagaattccagaccgttctcatgccaagtggaaggaaggattgttgtttcaccttccggacgggatgttccgaagaagttgaccggctcatgatgtgaattggttaatcccacagggacaatgatatgtccggcacgtacattgaaagaccgatggatcaggcgtgtgatgtggaactgttcaatagcgacttcgccacctttttccacctctgtttcatattcaccgttttcggagttctccagctcaaaagctgtgcctgtaccgccggattcaaactctatttctgctccgagtatccatttcgatgtaaatttataatcgaaagcaagtacgaaacgggggatggatatggtattcctttttttgttagggttaccgtcatttcctccatagaagcggtttataccatagtccttgaagttagcgaccatctctccgtatccgccaaaacggaactttgaatactcctctgtagaaggcttgtcgtttttagaattatctttcgtttcctgagccgaaagtgtgtagaaagaggacaggaagcaaagaacaacgattgcagttaattttctcatctttttaataattttatcgactgcaaagttatatgaggttaaaaaggctggcaatacctaaaagtaggcatagttatttcttaaattcagtatatgtaggtaatttttagctaagaatgggaagtaaggaaatttaaaagggtaaatgagtaaaaggtgcatatcagcatttttgcttttttgctgatatacaccttcttttgtttttagatttttctgacttgctttatttgacagtaatattctctttccaggttataccacttatatctgtcagaattagttcgtagtcacctttgggcaagtccacaaaaacatcacttctgattgtaagggttgctttacttcccaaaggaatgatgaggctgtgctttcccggagctactttggctacatagtcattttttattcgggtaagtgggaagcgggctagctcttctccattcttttgaagtattgtttttccattctcgtcttttagtgttatgccgatcaggaaggaaccgtacacgtcggctccttctatccggtatactttgaacgtgaggatatcctcttgaatctttgcgttggatatttccagttccggtttgaccgatttgttgtgcaaaggtccccaaacaccgttatggaagacttggttagtatataaggtcagtatgaaaagcagtactgcaccgcttattgcgactttactgaattgcttgatagatagtggaagttcaccggaagtaagccatacaagccatttgttcttggaaagtttaggcaataacagataatccaaagaatattttccgccgccggacaggaaaatagtgaatccggctgacactcccaagatgccgatttgccattcgtcgaggcaggtagtacccagccagccggagcctaaaagaatgccgaatgccagactgaatacgccgatactcattaatcgtgtgaagaaaccgagcatatagagtaacccgacgatgccttctactaatgtgaaaattaccattgcccaccaaagtaaatccggtgtgctgaccaagtattcaataatcggtttgataccaatggaattgggaaggaaatgattgaacttttctccaatgtatccggttccatccggaatgagtttgttttcaaggacgagtctgcgccaaaaagctgagaaataagtccagccgacgatcagtcgtaaggagagagtgaaaatgcccgcaagtacgtaggctttggatggttcttgttgttgtgtcagcatactgtttgttgttagtttgttattgagagaatcgtttcttattagaacaagtttccagtggaaaatgtttttgtgaaaacctgttttttttgaaacgattctactcaagataaactacatacaaaacaaagctaacaatgcaaaagttattctttaaacggctatctttataccttcttttttattacaataccgtttgcattgttggcaaaggtcgtatcccagcatggctcccaagatgaagtcctcttcggcagacagttgattcaaggggcgaatgatgatatgccgcatggcttccatacattcgggtttgccgaaaaacagattaatcttgttagtacctacttcttgtatcatataactgatcttctgattcttcagccggcggatggcaaactcttcgtgctctctgctcatcgtatagagtaccatgttgcgtacgcctttcttgaactcataaatgtggttgaggaaaatccggatttctccgggaatgattctttcggtagccatgatgtaaactgttattttatatggagataaagattagctgatttcttgttttacttgttcaacccatgcgctgatacgttcatctgtctgaccgtcttcattgacgtcgtcgagtggaagacctacgaacttgccattaacgacagcgatagaagaatcgaatgtataaccggctgtgtccaccgctccacagaatttgcagcgcgtatctttcagttcttcataaagaataccgatagcatcacagaacgtatcgctgtaagaatcggaatcaccacaaccgaacaaggctacatatttgtgagacagatcgcatttctttaaaattttaattccgtcgtaccagtcatcctgtaattcaccggctccccatgtggaactgcctagtaccagtacatcatattcaccgaccaaagcttcagtgagtttggatacatcataaatatgtgcggaaggaacatctagtttctctgcaatccgacgggcaaggtcttctgttgttccggtagtggaaccgtaaaatactccaattttattcatctttgattctattttaatgtgatggtgcaaagataaagggtctcggagaaataggaaatccccatttatagtggaataattgctttattctcattataaatggggatgttctctcgctttttttctacaagaaatgcaacttttattaaagttgtttttaaataatgtattatctttgcagagatcaaaacagacacatatactatatgaatatgagaagcttaaagtatttttcttttggagtatcggcatggttcttgcttcatgtgtagaagagaaaaatttgtataatccggatgaaggaacgcctgaggatgctcaactcggtttatctacggatttcttgttgaaaacgcaaaggagtatatttattactgctgtcgatggtgatggaaaatcacaggccggtgtgaaattcggtgtgtttatgagtcagccttacacgggcgaaggagttatttctattgatccggtctttgtcggatatacggatgcttcaggtaagttgaaagctgaagtggtgataggaaataatgtttccaaaatttatgtggctcctctcactgctggttatggtcaggtgaaggaagcggatgttcaggattttgtttcattggattttcaaggagtcagttttcctcatatggctgtctcgcgtgctttttcgattgagattcctttattttccggaccgatcagtggtctgtatcaattgtatatcccttataagaatgttgaaataagtagggatggtattccgctgcagggtgggtgttctttggtctctaaagagcaactatctcctgctttgattaatcagattgatagttggtacccagagaggcagaatgttcagaaagcagatttggataaaaactcggatttacgggtcgttgatgaaaatggagccagagtttgggtgacttatgtcggtgatggtggtttctatgtcgctaatcagactgtttataattcattgatgtattataattataaagaggaagaactgaatagtccaaatgatattgatcatcttcggatgactatgttgttgcctaatactaaccagctgcagtgtccgtcgggtttgaaagttcagttactttattggaatggaaaggagtatactgagattttcccaaaagggacacggataggttttgttgtagcacgtgccggttataagaaggatggtacggatgtaacaacgaagaatgcgtattcttttaaaaataaaacgaatcctgttgttaatggtgacgtctctggaatgtattactctactccggtattgaataaatggggaaaatctcaggctgtaactcgtcagttagatggttataattgttgtgtgaccggatttgatatccgtccttttggcgataatcaatcagattatgattttaatgatgtaatgttgaaagtgactgctactcctgaaaaagcaattgaaccgggagaggatattccggttgaagaagaagtagttgtaactgaatctattcatggtacattggctttcgaagaccagtggcctaatgccggtgattatgacctgaatgactttgtagtaaattatacatacggtttgggaaagaatacggaaaacaagattacaagcattaaattgcgttttaaaccaatagccaaaggggctgccgcttatacaaagatcggttttggcattgaacttccattggcagaaagttatattgatgctgcaaaggtgatgggagcgactttcgaaagtggtaattcaaaggcgacttttgtgatttgggaagatgtaagcagactctttcctaatataaatggttttgtaaatacagaaaaggggacgagttttgtttcagcagcggaagttgaaatcactattccgctgactattccggttgacaatgtttcaatgatgaaattcaatccatttatatttgtgaacaaccgttctcatgaaattcatttaacagactttgctccgacttcgaagatggatacaaacttgcttcaaactgcggatgactgttctgatgcatcacgaaatatttattatcggatggaagatatgtcttgttgggcattagattttcctcgtacttcagcaagcgacccggcatggagatatccgaaagaaaaatcgtcagtagtgaaggcttataagaattatagcaagtgggtaataaataagacggacttgtcttggtttgattccactatttcagagaatgtagatgaggatgaattatactaaaatatttttgttggttgtggagttgatgctttaaaagatacccttatttttctgagcaggtcttaaaacataagaatcccctttataatggagaaacggattagtttctattataaaggggattgatatgttttaatgatggaacaagcgaatgcctgtgaatgccattgccatattgtacttgtcgcatgtaccgataacatgatcatctcgtactgaacctcccggttgtgcgatatagcttacaccgcttttgtgtgcacgttcgatattgtctccgaaggggaagaatgcgtcagagcccaaagctacgccagtcattgtatccagccatgcacgtttctcttcgcgggtcagtacttccggcttttctgtaaaaaactgttgccaaacgccgtctgccaatacgtcatcatgatcttctgaaatataaacgtcgatagtattatcacgatctgcacggcggattttttcaatccagggcagattcattactttcggatgttggcggagataccagatatctgctttatttcctgcaaggcgcgtgcagtgaatacgtgactgctgtcctgcaccgataccaatcgcctgtccgtcctttgcataacatacggaattggattgtgtatattttaaggtgattaaagaaatgattaggtcacgtttggcttcagccggaatttccttgttttgtgtaggtaactctttcaaaagactttcgtctattttcagttcgtttctgccttgctcaaaagtcactccgaaaacatctttgtgttcgataggagccgggcggtaagccggatctatcttgatcacattgtaagttccttttcttttatttttcaggatttccaaagcttcgggagtgtaatccggtgcaatcacaccatcggatacttcacggttgataatgcgtgcagtctcttcatcacaagtatcggacaatgcgatgaagtctccgtaagaagacatacggtcggcaccgcgtgcgcgtgcataggctgttgccagtggagacagttttacatcatccacaaaatagattttcttcagtgtgtcactcatttctacagcaacagcagcacctgccgggctgacgtgtttgaatgatgcggcagccggaagtccggtagcttctttcagttcttttactaactgccaactgttgaatgcatccagcagattgatgtaaccgggatgtccgttcaatacctcaatgggtagttcgccttctttcatgaagatacgggcaggcttttgatttgggttgcagccgtatttcagttcgagttcgtttgccatattatttaattatgaattactgattacaaattgatagcgacaaaattactaaaaaaagaatagccagcctagcctcctgttataaattagtaacaagtaattagtattggggaaactgtgggtagcgaaaatacctatttgtggtgattgcatatcctcgaaatattccgttactttgcagtctctaatataaataggtgtaaatggataatttgcaaaaatacaaaccaactgataagatgattgatctcatcagtgataactattccttgttgcaagtgatgagccgtttcggcctttcgttgggatttggtgacaaaacagtgaaagaagtttgcgagcttaatggagtagattgcaggacttttctgattgtagtcaactttatgtctgaaggcttttcgcggatggatggaagcagtgaggatatttctatacctgcactaatcgattatctgcggcaagcccatatttactttctggacttttctcttcctgccattcgccgtaaactgattgaagcgattgactgttcgcaggatgatgtagcttttctgattcttaagttctttgatgaatatacacgagaggtacgtaaacacatggattatgaggagaaaacggtattcaaatatgtggatgcgctgataaatggcaatgctccccggaattatcagattagcacattctccaagcatcatgaccaggtgggagagaagctgacagaactgaaaaatatcatcattaaatattgtcctgccaaagccaatgagaatctgttgaatgcggctcttttcgatatatacgcctgtgaggccggtttggaatctcactgcaaggttgaagactatatttttgttcctgccattctgaagttggaaaggaggattagggaaaatgaaaaataacgaagccattcgaattgcgatcgccgaaacctcagtgattatccggggtgggctgaccgctgcattgaagcgtcttcctaatgtgaaggtgcaacctatagaattactttcagtagaggctctgagtgattgcctgcgtacgcaatatccggaaatgctgattgtaaatcctacttttggtgactactttgatgtaaataagttccgggaagaaactgccggtaagaaaatacgtttgattgctttggttagctcttttgtagatgcctctttgctgactaaatatgatgagtcgatttctatctttgatgatctggatattctttctaaaaagattcatggtctgctaaatctggcttcggaagaggaggagcttgacaatcaggaaacgcttagccaacgggagaaagagatagtgatctgtgtggtgaaaggtatgacgaataaagagattgcagagaatcttttcttgtctattcacactgtcattactcaccggagaaatatcagcaaaaagctacagatacacagtgcggctggcctgactatttatgctattgtaaataagcttgttacgctaaatgatgtgaaagatttataaccttaaaagaatgttataaaatctgaagccgtttgcgaacacggaatcttttcgtacctttgcagtgcaattgggaaattgctattagtttaaaaggtaaaagaaaagattattaaggtattagatttaaataattaaggtattaaattttttagtgttcaataggacattttttggtaaaaggtaaaaaggataacaataggtaagaagtttaaaaggtaaaaagaagattagttttcaggaattgaggtaataaaagaaaagcctttttggcttttctgatgctgtggcgagtggttcccttctaggaattgactcgttttttgtttatagacgcaggggagccgaaaggtatataaataccgggattgctaatgccaggagtgtataaaataaaatcccgacaaaatcgcttcggcgggaccctatttcatttttacttaaatgtggctacgtaataaaattatgactaattaattcaattctgatactgcaaagatagtgcgtttctgtatttgtcacaatcccctttataaggtatattgcgtagttgctctcactattaataattagtggtggatatcattttacttttttccactctttcgttgcgaaatcatatgatttgatcactttggcagggcaaccggcacaaatagagtatgctgggatggaacggctgacaacgcttccggcagccactacacaatgtttccctaaagtaactcctggcagtatgactgagtttacacctacccatacatcatcctcaatagtgacaggctgtgtacttactccctgttcgtcgattgatttctccgcatcttgataattatgattaagtcctgtgactgttacatgctgtgcaagattcacatgatttcctataagaaccggaccgataatggtatttcctaatccgatgcgggtataatctccaatgattaaatctcctaccgcattattaaggcaggaaaagtcttctactaccgaatagcgccctagcgagaactgattaaaaggaggaaggtctttgcggacactgcgataaatcacggaaccttttccacgtttcagatatacaaaatagaaaaggcgtatccaccagttggggcgtgtctttacaggatgcataataaaacgatgtacgacttgtttcaaagccggattttgtttgattcgcagtttcagtgtccttttttccatattgaatgtttttgtttctttttatcttctactaaataatccggtattgccagactgtatgtgattgccaatcctaaaagcaatatccaccacttgagtgacgaggtccagtggtatcctgttatcaataaagtccaaatactgatgaaggtgcataatttcatcggagaaggtatcagctgctgggctatacggttgcagaaattccagttgccttctaataaagacggcaatagataagagagggtcttccgtatgcgcctgcgatagggataaacaggggcggagtcacagtgtacaatcacatccggcagatattcaatatatatattctgtttgaataactttcgttcgagatttgttttggcagttctttgattcttctgtagccattctaagtcgaaagccatattggttccgaaaagacttgaagaaaagccgatctgagtattccccgatctgaaaagactgttattgatttcttcggatagagcatggaaatgtttccgtactcccttatgattattaatgatcgtgtgtaactgcattgcctgtattccggcatcgtaggcattataaatcttttccagaaaatggggtgataaagcactggctttatcagaaagaaggatgactaattcgtatcgttctttatctaatgaattaattgcttccagcaaatctttatatgtgatgaattcatatgcttcctgttgatacatgaaaggaaggaggcttccgtcctgaactaatatggcacactgatattgttttctggctttgggataattggaatgtttgaaatgtgaggcaacagccaatatgaaaaggtataggagcaaaagccctatacacaaaaagaagaaatcgtctgctatgtagataaagtagtccatcctgtagtgaaggagttatacgttctctttttgaacgaatgcagtaactgttttcagaatgatttttatgtccagtccgaaagagaagttttttgcatattggatatccagttgcttgcgttcttctgcggagagtttacccgcttcacctcttttttcaacctgccacagcccggtaagaccggctggtcccataaaacgatcaatgtgttcatcactagtcagtaactctgcctcatagagtgggaggggacgattgcccactatagacatatctcctttgaggatattgataagctgtggtaattcatcaatgctgtatttacggataaaacgtcctatctttgtgattctggggtcattttccagttttacgaaagcattacttttctcttttgatttcttgtggatatagtcttcttcagaaattacaaaatcgtcggatatcaggagaatttcttcttcgtctgcttcttcagagacacaggattcttctccccatatatcttcttcctcttcttcttcctgttggtattggttgagagcattgaaatccttcagatgtttatcagcgtcggtatacatcgaacggaatttgagaaaatcaaatatctgataattgcttcctacacgtttggatttatagataatcggtcctttgctctccaagcgaatggctatagcagtagctattaaaagaggagaaaggaaaagtagtgctattccggaaaagaatatatcgaagattcttttccatgaaggcaggcgaaaggcttttaaattctgtgtttggagttgcagtgctgctattttttgttcttttctacgtgtgagaaaagttgacagatctttcagtacttcactgttggtttcgtacttaatcgtgttattaactcctgccttcaagtattctgtagcttcttccttagtaatggaatctataaccagtaccatataaagccctggatacatttttcgtatagagcgaatatcagcgatatcttttgataattctacctgctcaataaataaagctgcgtcgtatttttctcgtatcttgtctagcactttagttgccttatagcagtttggtgctgcatagaatactccggtacttaatttcgaaaacagttctattgttttgttgtgtctgcctatgtaaacaaaatattgcatttaaaggctgtattagtcgataatctttttgattcggatttttagttccaaaggattgaatggcttcagaatatagtcttctgccccttcttccagtaatttgattctttccgtagtactttcttcgctggacagcataacgataggaattgacttgaataactcattggctttcatatatctgaggaattcatctcctctcattaacggcatacgaatatcggaaataatgagatcgggtacattaccttcattaagccaatctattgctttaataggattctccaaatacataacgtcgtaatccttgcctaaatatatacttgcaacttttccaatagtcgctttatcgtcaactaatagtatcttttttttcatacaaatagaacctttctatcgcttgctttgctacttgatttatatagattaaattgaatctcttgcctttgtttcacttcgtgcaaatatatatataattttagaataaacttccaattagcagaagtaaaattcatgaagattattatttttatttattaatagaatatatctgatacgtttagtgaggaaaaaaaacacggatttcattatttttatgaaacccgtgttgataagggagattagtttttatttgtttggaataccttgtttacatcaaaatcattccaccatttttcattttctgtaccaccgctcgttacccagtcactgaattgtgaataagcagttttgatatttacatactccaaaggccatttgaaattggaaggaaccatgatgccccatgccagattctctttactgatataatattttttgctagcatgatggctgttatcgttgtttccgccaaacagatcggtatttgcgagtttggttggttggtagcctgcaacatgtatttccttacgtgggtttctgttgccgtctacgatgataaagacattcaatttgttgacattaaaggcatctgctgatattgtcggattattgaatgtaatggagaaactgatatttttaggtttggtattgcctgcatagtctgaaacagtattaatctgctcataccgatctcttcccaatactttatgagcatcatcaaacagaggaatcacagtataatcctgaccattttcgatattgttattatttagattgaaattcttggcaagagtattgtcactgaattcaactggctgtgtaatggcattggcgggtacattgtccagcataatagctgctccgatgctttttgttgctccggctgcggataagtcaatactcaactcgaattttgttactttattctctttattagtatatattttccttttctgaatggtcagaacgatgtcattcatatcataatctccatatagtggccattggtcttcaaagaggtaggtataatccttgttgtcttccacttcaatagggaattcaggatcttccgggtcaggggtagggtcaggtatttctgaaatttcaccacatgaagtaatgattgttttggaaccattagggatatataattctactgaattttccataatgtaattagggttattggcaggtacccctttggcgaattccccttccgggcattcaatatctaaattaccattgaacttagttgtccaaccagtagatatgctttttgtagattttaataatgaacgggttccggcagctttaaaagtgacattaggaatatccattatctctgcttttatcatagaaccattattcagttcaaaagtgcttccgctattaccgcatttaaaagatggaatagctataaaagtaccattttctatgccaccagccaatatacctttattcattatgatagttccgtttgttcctccgaattcgaaagagtttttggcataaagactgcaattattagtaaaagtagggttaccgccattatcattacttattttttgagcattaacagttccatcatttacaccaattccacctataatgaaagttggagtattaattgttgcttcagttccattataaaaatagcatgttgcatcttgagagttaaactttaatgcaccttcttgaatagtcaattctccaaagttataaatagctcctttggtaaatatggactgttcccaagaagcaacagattttcctgtaacattaattgtggctttaggagcattgtataaaatagacgtcgtattcaagtccttcatactattgacattaattgttccaaaatttttcagtagtactcctatggcagcaagattgatgttattgccaataagacttccgcctgattgaatcgttaatattgagttgtcagcaataagaaaactcgtgaatgaatctgtgttgatttttccacccttcaaaataataatatctgcactttgtatttggttttgcgagggtgtccattcaccttctacaaatatggtaaatcttccgccattcaaatatccactggtatggttgatttcaccattaaatttgtcttttatgatatagcttttgcctgcttccaaatgatgatttgattgattccaattagtattacctctaagttcaatggctcctgtggtatcataagtttcttcgggatatttttctggaatattatagcttccggtggtcgcttttgccactcttgtagtccttgaacctacaatttctttatttttagatacatcccatgtactaatagacactctgcttctagagtctgtcttacgaatatataggtaattagttccttctgtataatttatttcttgtgaaaaagcttgaccttttttggaaactcctttggcaagtatatggtaatcagacgttgaaaatggatttgcgtccaatatttctatttggttgtatagttcatcatcaatttctatgcttagaatactagttgtagtcatattccagtcaaatccatccggtgcagcaaaaccgtcccccattggattggctgtctgataagacggatcatatagatccttctcggaatctacgcaactggataacatccttactattgctatcgcaattatagatgtaagcagaattgtttttttcatcataatgtctattgtttgattgtttttttgtttgttgcaaagatagttgtatattttggattaaagatgtatttattgatatttcttgtgtaaaaagcaacgatatttccgttttggttcgctttatatgaaaaacgaaagagtaatctcctgattttttcttttgcagaaatattataggatgaaaatcaggagattactatagagattttcttttttagggtttggttatttcccctattaaacaagagttcattttgtatcggatgtctttattagatagtccgtgtcccagcaaaaacatcagtttagttacagcacattcgggagtactgtcatatccactgataacacctgcttcgagcagatgcattccggtctcgtaacgtcccatttctactgctccggaagcacattgtgtgatgttaacaatgataattccacgatcagtagcctcttttaattcccggatgaaccattctttttgcggtgcatttcctgatccgaatgttttcatcacgacagctttcaatccggggacatggagtagtgaatggatgatctcctcctggatgccgggaaaaagagttaatattaccacatttgtatcaaacagatagtgtggctttagtggtttgtccggggtcggtttgcgaataaggttgggctcgtatttaatatggatgcctacgcgtgccaatggcgggtaattgaaagaccggaaggcattaaagttctcagcattgatttttgtggtacgattacctcgcatcaggtgattttcaaagaaaatacatacttcggggacaatagctgtaccgtctggattcttggcagcagcaatctcgattgcagtgatcagattttcttttccgtccgtacgcagcgttccgattggcaattgagaaccggtcagaataacaggcttactcagattttcgagcataaaacttagggcggaagcagtataggccattgtatccgttccatgcagaataacaaaaccatcaaaatggtcgtaattatagttgatgatctttacaagttttgcccagtaagcaggctccatatccgaggagtcgagaggaggttcgaattgataggaggaaatgcgatagttgaatcttttcagctcaggaacgtgcttgagcaaatggtcgaaattaaagttttctaaggcacctgtctccggattttctatcattccgatagttccacccgtgtaaatcaacaaaacagaaggggtctctactctcataattgatgaatttctgttaaaacgctgacaaagatatagattaattgcgaattatgaatagtaaatgatgaatttgttcgtagtttgcagtgaaatgttataaatatgaatatttatgcggaattatacgatggattaaaagaaaaaatgaagtgagtcgtaaaaatagtcaagtagctaaaattgttcggaaagaatggttatgcaaagcaaaacgatgctgtccggctattttagctactatttgtctgactatttcctatgtctatttaagtgcatttttcagtttcagaatggctttttccggatctttttcttcttcaagcagagtgacaaagcggctaccgatgatagctccggaagcatgttcgcaagctgcttgaaaagtagctttgttggagataccgaaacctaccattagcgggttgcgtagattcatgtcttcgatctttttgaaataggcacgtttctgttcgttgaagtcctgttgtgcgcctgtagtagctgcggatgaaaccatatagatgaatccgtctgtatgtgcatcgatctcacgtacccgctcttcactggtctccggggtgatgagcatgattactttgattccataacgttcggcaatgatacggtagtgatcctgataatctctgaaaggtaagtcggggatgataacaccgtctattccgcattccacgcatttgcggcagaagttttcaaatccgaactgcataatagggtttaagtatcccataaataccaatggaatgcttacttcctggcgaatgtttcgtaattgttcgaaaaggagtttcagtgacatgccgtttcgtaatgcctgagtggcagcgttttggatgacaataccgtccgccattggatcactgaatgggattccgatttcgatcatgctgacgccatgtttttcgagagtacggatgacattgactgttccatcaagggcaggatcacctgcacaaaaataaatagaaagaatatctttcttgttgctattaaagagttgattaattctgttcatgattttgagaatttaaatttatgactttagttcatttagaaacatccggattcgttccgggtccttttccccgggcttcagttcgaaacggctgttcaggtcgtaccctgccagacggggatggttgaatgctttcaatgcattggcactgtgtgagttgatgccgccactcaataggaatggaacttgtccgttgtaggtatgcagaatgttccagtcgaattggtttcctgagccaccatactgctcacatttcgtatcaaacaggaaaagattgcaagctttttcatacttgcttatgtgattcaagtcttttgggcgagccacagaaaaagctttgatgattttcaggccggaggtgcgcagtgactgacagtattccggtgattctttgccgtggagctggatatattccagcccgaaacggtcggcgtacatcgtgattacatctttgtcttcattcacaaaaactccgacacggcgggcacgaacgggtaggtaagcgggaagttcgtagatataacggggagatttgggatagaagataaatcctatcatatccactttttgtagtgactccacatcccgtatattgggggcttcacgcataccgcatactttgatgatttttccgttgatcatagggctgtccgtttttggaagttcatgtatttattgaatggctttcagaaagttctgcagcgtttctcccggttgcggagttttcataaatgtctctccgatgaggaatccccggaatccggcagtccgaagacgttttaccacttccggattggaaatgccactctccgatactaataccgcatcttgtggaagttgtcctgccagttggaaagagttttctacatctgtgaagaaagtacccagattgcgattattaatcccaatcatatcaattttactattaatataaggtaactcttccgcactatggatttcaagtaatacttccaatcccagttcatgtgcctgctctgccagttcctgacatttttcctgtttcagtgcggcggcgataagaagtacggcatccgcaccgacaatttttgcctgatataactgatactcatcaatgataaagtcttttcttataatgggaacatcgaccaaaggacgtgctgtacggatatctttcagacttcctccaaaaaatttctcatcagtgagaatagagagggcggaagcacctgccgccacataagacggaacaatctcttcgggacgtgcttcctgtttgatccaccctttggatggtgaccgacgcttaaattcggctataataccggaatcggaagaagccaatgcctgtttcatagaacgggcagccggaacttcattgataccttcctgcaactgttcgatggaaatagcctgcttttgcaaatcgacttcaaaccgtttgttagctataatttcggataatatatctttcattaatcttaaattttgaatcaaggcaaaggatatcgtatattcatcctttaccacttatcatttataacttattacctattacttattattcaattcaatgaatttcttcagtgtagccaatgcccggccactttctagtgattctttagcgagggcgatgcactcttcaatcgttttttccggacgaactacttgaatagcgaaagctgcattgataacaactacgtttttctgtgcttccgtagctgtattgttcatgatgttatcaaagattttagcagcatcttccgatgtctgtccaccatccagatcagtatcctgataacgtgcaaatccgagaccttccggagtataaatcttctcattgccacaggtagctaccttaaactcgttcgtcagagaaatctcatcatatccgtccagactatgtacaacggcaaatttagtcttactctcctgataagtataggtataaaggcgcaaaagcggaagattatacacgcctaaaagctgataagttggcaataccggattgaccaacggaccgagcatattaaagaatgtacgtaccgccaatcctttacggatcggggcaactgccttcagtgccggattgaacaaaggagcgtgcagataagcaatattacattgttccatactgcgccgcatctgatcaacatcacttgtgaatttaaccccatgttgctccatcacattgctggcaccgctgactgaagtagctccataattgccatgttttactaccggaatacctgctccggctactgtaaagcaggccgccgtagaaatgttgaacgtattttttccatctcctcccgtaccgacaatatcgatcggagcaaactcgctcaaatcaaccggaacccgcatttccaataatgcatcacggaatccgcataattcttcgacagaaatattacgcatcagaaagacagtaatcagtgatgctacctgtacgtcattatatttcccttgtgcgatgttttgcaggatagtacgtgcttcatcgcgtcccaaatattggtgttcgaaaagtttatatagaatctgtttcataagtttattcgtttaagaagtttttgatgatttcttttccttgcggagtcagtacggattcgggatggaactggatgccatgtacatcataggttttgtgacgtaatgccatgatttgtccttcctgactttcagcagttatctccaggcactcgggaaaaccttcccggctgactacccaggaatgataacgtccgacaggtatctctttgcccagcccttcaaaaagtacgtctttctgcaggatgctgatcggtgtctgtacaccgtgatatacttctttcaggttttccagtcgtgcaccaaaagcctcgccgatggcctgatgtcccagacaaacgcctaaaatactctttgtcggtgcatatcgtttgataatgggcaatagcaagcctgcttcttcgggtattcccggccccggtgaaagtatgatcttatcaaatcgttccacttcatcaaggtttatctggtcgttgcggactacttcgacgtctgtagctcccagttctttcactgcatgcagcaaattgtaggtgaaagaatcatagttatctaaaagtaatattttcattttattgttattgtaaaattgttgttcaaatactgtttctgacttatcaggcagatcgctctgaacagttagttttttaaattaacagctaaatcgatagcctttttaagagctcctaatttattgtttacctcttgcagctcgtattcatcctgactgcgtgcaacgataccgcctccggcctggaaccataactcgttattccggctgacaaaagtacggatggtgattgcctggttcagttctccgttaagtccgataaagccgatacagccgccataagcaccgcggttatgaggttcgatttcactgatcagctgcatggcgcgtactttcggtgctccgctcaacgttcccgcagggaaagtatcgatgaaagttttaatcttatccgccccttcattcagctgaccgctcacgcggctgaccagatgaatcacatgactgtaatactgtggttccttataaaacaatacccgtacatcatggcaattacgtgaaagatcatttcttgccagatcaaccagcatcacatgctccgcgttctctttcggatcggcaagcagtgcttccgccaattcgcggtcttttaccgtatctccggtacggcgggttgttccggcaatcgggtcgatgtaggcacgtccgtcttcaattttacagtgagtctccggagaagaaccgaaaatgcggtatcctccgaaatcgaaatagaaaagataaggagaagggttgatgctgcgaagagcacgataaactttgaaatcatctccggcataaggctggacgaatcttctggaaaggacaatctgaaaaacatcaccacgcatacaatgggcaatacccttgcgaacgttcgctttatgttcctcatcggagatcgggctgctgacaggacctgtcaccgagaaattataagaagcataatttctgttttcgatagcggcctccagttccggcaaaccgctttcttcaccttcgcccagcatttctaccaatgtcaattcattcttgaaatgattgaaaacgatgatatacttatataatatgtatagcaagtccggagcatcattctgctcatcatgactttctttcaccgggatatgttcgaagtatttcactgcgttgaatgtggtgtatccgtaaagtccgcacacattcttgttttctccggtcacttgaaactgactgatgaattgattcatcgctttttctaccgtgaatgattgggtgagcggctcttccttccgactattgtcaggataactagcagtgactattccgctattgacaccgatacttgccagcggacaaagagcgatgaacgagagggaattttctcctgcatgataatcggaactctccatcaatgcagattgtgggtacatatcacgtactttcagatagatactgacaggagtgtgcatatctccgagtacctgtttgctatgggctgtataactgaatgttttcatttttataatttctaaattcaaactacaaaactagatgttgataatcacttttcattgaaagacaaataagtttcaatgtctttgtcgccacgtcccgatacggtcagtacaaccacatcttccggtttgaacttcaattttttcagcgcacccagtgcgtgggcagattccagtgcgggaatgattccttcaagtttggtcagttcataagcggcttctattgcttcgtcatcattgacagccaatacggtagcccgtctttgagcggcaagattggcgtgtatcggtccgattcccggatagtccagtccggcggagatagagtagggttcttcgatctgtccgtcttcgttctggataacgtaagtacgggctccatggataatgcccattttcccaagctgtatagtggcggcggtcattccggtttctattccttttcctcctgcttctgccagaatgatgcctacccgttcgtcattgatataatgataaatcgttccggcggcattgcttcctccacctacgcaggctatcagataatcaggataatcacgtccttctttttccaaaagttgttttttgatttcttcgctgattacggattgcaggcgtgccaccatgtcgggataagggtggggacctactgtagagccgatgatataataagtgtcggcaggatgacagcaccagtcgcggattgcttcgttggtcgcatctttcagtgtcatgttaccggaagtgactgggattacggtagctcccagcatcttcattttttcgacattgatgtgctggcgctcaacgtccgttttacccatatagacaatacattccatatccatcaaagcacatacggtagccgttgcaacgccgtgttgtccggctccggtttcagcgataatacgtttctttcccatgcggcgtgccagcaaaatctgtccgatagtattattgattttgtgggcacctgtatggttcaggtcttcccgtttcagatacattttgcaaccatacttttctgaaagtctgcgggcgagatagagtggggaagggcggcctacgtagtcacgcagcaactggtcaaactcctttttgaaatcttcgctttcgagcactccgaggtacgtattcttcagttcctctacacatttgtggagaatttccggaacataagcgccgccgaactctccgtagtaaccatcctgatcaactaaaaaacttttcataatcctatttttatttattattatttattcgattttcaaaaacgggcaaataaaaagagccctgtcgcaggttgcgacagggctctttcaaatttgttatatctttaatgaggtatatacatacgagcactgctcccttacgactgtcggagttgtaacgggcgccaccaccaatatgtatttactaacattgttctcattgtcttttgttatttatcggggacaaatatagacactttgtttgaaacaacaaacaaaatcttactttttttctttttcctcttcatttttctgatatagaacaattttctgcctgatctgttcttataaatattgaatatttaaacgaaaaacaattatgaaacagagaaaagtcttagtaggtattgctattgccatttttattatattattgctttattggttattggtagctgaagatatgaaaccttggctgtccgctatggttccttcagccttgcaacaattcattgcctgatcccgacaggtttcagataattggcgtatatttgcaaggttagtaactaataaccaaaataacaacaatagacagatatggaaaattttatctttcagaatcccgtaaagctgattatggggcatggaatgattgcccggttgagcaaagaaataccatccgacaaacgtatcatgataacttttggcggaggcagcgtgaaaaagaatggtgtgtatgatcaggtaaaagaagcgcttaaagaccattttacaatagagttttggggcatcgagcctaatccggccatcgaaacgcttcgcaaggcgattgctttgggcaaggagcagaaagtcgattatctattggctgtaggcggtggttctgtgattgatggtacgaaattgatttccgcaggtttgttatatgatggtgatgcatgggatttggtacttgccggacgtccggttaccaagactgttccgctttctaccgtattgacacttcctgccacaggttcggaaatgaataacggagctgtcatctcccgtcacgaaactaaggaaaaatatcctttttattccaatttcccattgttctctattcttgatccggaagtaacctttactctacctcctcatcaggtggcgtgcggattggcggatacattcgttcatgtgatggaacaatacatgacagttgccggacaaagccgtgtgatggaccgttgggcggaaggtatcctgcaaactctggtagaaatagctccaaagattcgtgagaaccagcatgattatcagcttatggcagatttcatgctttctgcaacaatggcattgaatggctttattgcaatgggagtgtctcaggactgggcgactcacatgatcggtcatgaaatcactgcattgcatggactgacacatgggcatacgctggtgattattctcccggcaactttacgtgttcttcgggaagcgaaaggagacaagttggtgcaatacggtgaaagagtatggggaattacttccggaacgaaagaagaacgcattgatgaagcaattgatcgtactgaagagtttttccgttcattgggcttgactactcgtctgcatgaagaaaatatcggtgaagaaaccgttttggaaattgaacgccggtttaatgaacgtggtgccaagtatggagaaaatgagaatgtgacaggagccgttgcccgtaaaatattggaggctgccctctgatcgcttcttttgacactgttttgaactaaataatagtcggttctatcttccattctcctccttctcgaaggaggagaatggagttactattgtgtactactgtttagttcattcctaaacagaaaggagtaaaactgtacaagtatgaattagtgtgtacagccatttacagttaattatttgatttttgggttatcggaagtctgaaccaaaagcacgaaccttctccttctttagaatctgctccgatagtgccgcctaagcgctctacgatcacccggcagatagccagaccgagtcccgtaccttttgcgaatgtattcagcttgacgaaacgttcgaatacctcgtttattttatcctccggaatcccaatgcccgtgtcttttacatagaagtagatttcatcttttgcttcgtcaatccgatatcccatttgaatggaacctttcggagtgaacttcatcgcattgtttgtgaagttgatgattacttgcgaaagacgtacgcggtctgtgttgagaatacattcttccgctttctccgtgaaggtgatcgccacgtcgggagaagtgtttttctcttgcatttgcctgcaaataccttccatcagatcattgatatcggtaggggcaagagtaaactccatcgttccggcttcgattttggaaagatcgagaatatcatctatcaattgcagtaacaactcattgttactggacactatcttcatgtattcctgtttctcttcctcttcacccgtttggcaaatcatgtcagagaatccaataatcgcattcaacggagtacgtatctcgtgactcatgttggcaaggaaagctgatttcagacggtttgattcttctgctttttcttttgcttcctgtagcatcttgtccattttcaccttttcggtgatgtcttcgaagcgcaacagaccgccgatgatttctattccttcattatcataaaccggagtagctgtcacttcaaagtctacctgatctatctggatagtatggcgtatgatttttccttgttcaatcgctttctgaaaggcgcattgttcgcatggagtatcccggagtgcacttgttttgtagcagatttgtcccggtgtataatgccttcctttcacgaggctggcaatttgcgtcgtttcttcccattgtaccagatagtttttgtcgatataaatgagcccgaagttgacgctcttcaaagctagcttttgtttgttcagcgctttttccagttcttctttggcggcaatcagttctcgttcgtaagtctttagccgggtgatgtcccatcgggtcactaacagccattttttcttttccttccatttgataatcgattttacggcaattgtatcatgtactgctccgtccactgtgctgtagctttcttctgcccggtatatcttgtctgcctgcacaagtgattcatccacatcacggtattttctgccccgttcttctccatagatttcgtagtctgtgcatcctattgcttcttcccgcttaatgccggattgcagttcggattctttgttccagtaatagtatcggaaactattctggatatcttttaccataatagggaaagggaggttatcgagtatatcgaataaagaatgatagtaatcctgttcttttcctatattctttttaagttgtcgtagtctgtataataaaaagcagatgatcaggagtaaaaagcctattagtaaataataataactccaatgctggtctgtaatccatataacggatagtatattgtttgccataatttatgtttgtactaaatctgtggtaaatatatgcattttttgtaattcacaaaggaaatttctgaaatatattgtttatcagccttataaaactcttctgaaaagaatacctttactgattagtagaactttggtgccttctatttccggttcggttttaaaatgtttttgatggaacgtattttcgtaaagagtaagaatgtattaaaatattaaatgatgtcccatgaaccaaaaacaattctaatttgtttttataacggcaaagtattttttaattttgctcctccaaaataaatctttgatacattcaggataaaacaatcattttatttttagcttatgttgataaccattatcattctcgttctttcggctatcttttttgtaaacggtaagatacgttcggatcttgtggcactatgtgcgttagtagctttgcttatctttcagatattaacacccgacgaagccctttccggtttctccaattcggtagtcattatgatgatcggattgtttgtcgtgggcggagctatttttcagacaggactggcaaaaatgataagttcgcgtatccttaaacttgctggaaacagtgaaattcgcctgttcttgcttgttatgttggtcacttccgctatcggtgcgtttgtcagtaataccggaacggtggcactgatgcttcccattgtggtcagtctggcgatgagcgccaaaatgaatccgagtcggttgctgatgccgttggcctttgccagtagtatgggaggtatgatgacgctgattggtacaccgcccaaccttgtcatacaaaacacattgacttccgcaggcttcgaaccgctttctttctttactttcctgcctgtaggtttggtgagtgtggctgtcggtacgctggttctgatgccgcttagtaagtggtttctttctaaaaaagggcagaaagatgataacagccgttcgggtaagtcgctgaaacagttggtgaatgaatatggtctttccagtaatctgttccgtatgcaggtgattaaagactcccgccttttgggaaagaccatcctcgatctggatattcgtcgtaaatatggacttaatattatggaagtccgtcgtggagatgcttcgcagcaccgttttctgaagactattactcagaaacttgccgaaccggatactatgctggaagcggaagatattctgtatgtgacgggagaatttgataaagtgcagcaatttgccgaagattatctgctggatatattggatgatcatgctacggaagagacgaaaagcactactaattcgcttgatttttatgatatcggtattgccgaaattgtattgatgcctgcttccaatctagtcaatcagaccattaaagagtccggattccgtgataagtttaatgtgaatgtattaggtatccgtcgtaaaaaggaatatctgttgcaggatttgggaaatgagcggattcatagtggtgatgtgcttttagtgcagggaacttggagtaatattgcccggcttagtaaggaagattcggattgggtagtgttgggacagcctttggcagaagcggctaaagtaactttggactataaagcacctgttgctgctgctatcatggtattgatggtagcaatgatggtattcgattttattccggttgcacctgttacggccgttatgatagcaggtatcctgatggttttgacgggatgtttccgtaatgtggaagcagcttacaaaacaatcaactgggaaagtattgtattgattgcggctatgcttcctatgtctttggcattagagaaaacaggcgcttcggagtacatctccaatactttggtaagtgggcttggatcttacggaccgatagcattgatggctggtatttattttacgacatcattgatgactatgtttatcagtaataccgctactgctgtcttgcttgcaccgattgctttgcaaagtgctatgcagatcggagttagtccggttcctttcctgtttgccgtgacggtgggtgcaagtatgtgtttcgcttctccgttctctacaccgcctaatgcgctggtgatgcctgccggacaatatacttttatggattatataaaagtaggattaccgttgcagattatcatgggaattgtgatgatattggtgctgcctctgattttcccattctgacagatagaagggaattagtataacgttttagcaactgccttgtagtctgatatcagattacagggcagttgttattatatcaatagatgattgcttttatcataatgttcggtgataagtctttcttctgtcatttgtttgtagaaagatccgatttgctttcctgcctgttttttaataatcttctgttagcttggaaaggtggttgaattatcgcaaatatacggttgatttgcatgaaatgaccgtatgattcggtgaaaaacaccgtattgtttgtgaaaaagatgcggatgaagtaaccaaaagatgcagatggtgtcactaaaaggtaggtatgatgtaagtaaaccattgctatagtgtcattataccgataaaactgtctttatttaatacttttgaccttctctgttttctatttcgctctttggaaagtttagatggctaatgttgaaaataaacagaactgatgaaaatataatcatgtagatatataagtagagtataatatattaataagtgctgaattggatgtaaatgctgattttttgatatatgctagttgcccaacaatcgcgaaaaaatatcaataatagtatgaccggctaaagaagcccttcttgatgcattacgaattacaaactgtcaaaaacatacttatctttcagaatgtcattttatacatgaagaaagatggaatttatagaaaaaggctcctgatgcaaatgacttatcattcggatatcaggagccttttatctatttattgaacctttggtgcgacaggtgtattcatcttctgagtgtacaggctgtcgataattccgtcggacagtccgatggtaggtacaatgattccggtagctttcacattcatagctacttccagaaatatctccgcagccggaacgatgacatcagcccgatcaggttttagcttatactgtttgatacgttgctcggcaggaagagcttgcaatgcttcgtaaatttcacgtagcgattcgacgggtaggagagaagcctttttgtctttcttgtctgccagacggaaaagcttattgatgtttcctcccgaaccgatgatgctggtaggcgcgtattccgcggcaagccctatgaggtcggtgcgtaaagcctctttttcttcttctttcaccatgccgctgagcatgcgaaccgttccgatattgtatgaacgggaatttttcagttctccgttactgatcagattaatctcggtgctgccaccgccgacatctacatacaggtagttttgtccggaagcaaaaagttgctcgatatggttgtcatatacaatgtgtgcttcttcttgtccgtcgatgatatctacgcggataccagttttcctggctatttgtcgggcgatgtcctttccgttgcgtgcgtcacgcatggcggacgtagcacaggcacggtaatctactacgtcatatatcttcatcaactgtttgtaggctttcatcagccggatcagtttcttttctttttcagcagaaataactcccatggtaaaagcatcttctcccagtcgtaagggaatgcggatgagttgtaccttgctcattaattcgggagcgttttcttcgtttacgcattttatcaatagccgcacggcattcgaacctatgtcgatagctgcataattaactttcttcatacttatcataatgtattcttgtattttctatataattcttcttgcgaacggaaaacgacagtggctgtctctgcttcggcaagggcaggagtgaagtctttgcagagtgtggaaggtcggttttcccaaggtcggttttctccggtcccgtctacgatacgtcctttggccgtatcccgatatccgtagcagacaattcgttttaagtctgcctgtatttctttgtcgtacaccggagccagtacttcgatccggttatcaaggttgcggggcatccagtcggcagaaccgatataatatttttcttctccgccattggcaaagataaagatacgggagtgttcaagatatcggtcgataataccgttgatatggatattttcactgatacctgcgatgcctgtcaccagcgaacagttgccgcgtactaccagttccacttgaactccggctgtcgaggcttcgtagagtttttctataagcgcacggtcggtaatatggtttacttttgccagaatataggcttctttcccttgttccttgttctttatttccttgctgatgagagcaatcagacgtttgcgcatatcgttgggtgaaaccagtaattctttgaaattgacgggagtgtatggtttctcaataaagtcgaaaacggcattcacttctcgtaccagcggacgatgggcggtcatgatggtataatcggtatacatacgtgcgtttccttcatgaaagtttcctgtgctgatgcaggcaatgtctccgtgacgggtaccgatatgtaccagtttggaatgaatcttcagtccctccactccgaagataacgtggatgcctgcgtcctgcattcttttgctccagttgatgttggatgcttcgtcgaaacgtgccagtagttcgatgaccaccgttactttcttcccgtttttggctgcgcagatcagtgctttgatcacttttgattctttagcgagccggtaaagtgtcatcttgatactttttacttctttgctgatggctgcttcacgaagtacgcggatgaaagtatcgaagctatggaatggataatgcagggagcggtccttctgacgaatcaatgtgagcaggctttctttgccgtttagttcgggcttgaaaaccggttcccagacgggatactttaagtcgtagcgaccgcacaccggaaatttcatcaagtctttgaagttatgatagcgtcctcctgccacacgggtgtcgtttttatccacattcagccggtcaactaatcttttcagtaaatctttgggaatctgttcgtcataaacgaatcgaatcggttctcctctcttccggcttttcactccttttgaaatcttctgaagtacgcctgtccgcaggtcgctgtctatctccatttccgcgtctttggtgaatttaaaggtatatgcctcgtaatccgtatatttcatgccgacaaaaatcaacggcagacaatagcggatcacatcatcgagaaacatcagatatgttttcccctccgagtccggcaattggataaaacgaccgtattcttcggtgggcaattcgatcactgcataatctttctcttttatttttcctgtttcgtctttacgaagcaggcggatggcgagataaatatcttcgtcagtctggtcgtccagcggtcgggctccgttgaggaaaagaggggtggtggagccattcagtttattgcgatagaaggaggtgataaatgtcttttggtcatccgtcatttcggtgtctttgatgacgcagatgttttccttcttcagttcttccatgatggaagcgaaagtttcttcaaattgttcgtagaagcggttgtgtagtttgcttatctgcttcagtgtgcgtgtagccgtttcttgttctttctgtatgtttttatctgcatattcgatgatccggttcagcgtagctacgcggacgcggaaaaactcatccagattattggaatagatgccaagaaaagtcaggcgttccagaagaggtacttccggacgggcagcttcgagcaggatacgctgattgaagtacatccagctgatgtcacgttctacataagggcacttcttttttgtttcgcttgatttcatgatgaaaaacctgtttattaattttctgcaaaattatctaagtgaggtgtaatggctataacgattttgttacgaacttattacaatctacgtttgttatttttatatgtgaatagaaacacttatattcgcaaaagtattgaaatggacttcgttaaaaaatatagaatatatgaaaacaatgaattactctctgattcgcattttgtttgcgcttgtcataggtctggtgttggtactttggccgaatacagcagctagttatattgtcattacgataggagtggcttttttgattcccggtgtcatcagtctttttagctttttcggacggaaaagatcggaacatgaaccggctccccgttttcctattgagggaatcggcagtttgttattcggactttggctgattgtgatgcctgagttttttgcagacgtcctgatgttccttttgggctttatcctgatcatgggaggtgtgcagcagattgcctctttgtcgatggcccgtcgttggacacctgttccggggattttctatctggtgccttcattgattcttatcgcaggtgttattgcgctgttcaatccgacgggagtacgtaatactgctttcattattatcggtatcagtagcttggtttattctctgtccgaactgatcaactggtttaagtttgcgcgccgtcgtcctaagactccggttacgcctcacgatgaggatattgaggatgctaagattatagaataaaaaaagaagaggactaccgtcacggtacccctcccctgcaaacttaaaacaaccaacaaaagaaatagataatttctatcttaatgctgaatgaagatattctccattcagcatttcttttttatcttacaaacaacagttctctgtatttcggcagtgtccacatctggttgtctacgatcagttccagcttgtcaatgtggtaacgaatctcttccagtgccggaacgattgtatcgtggtaagcgatcgctttttcgcgttcgctttcgatcttgttcgccacttttcgtgcttcaatcattgcatctacgtgttctttgatgaaggcggtgcggtcggcgatttcttcgatcagttccagattcttggcagatagtctggctgctttatctgccggaaataaggactgcattttatagacattattaatcagatccgtctgatattgagtagcgaccggaataatgtggttcattgccaggtcgcctaatacgcgggcttcaatctgaatctttttcgtgtaagtttcccattttacttcgttgcgggcttccagttcctttttcgtcatcacaccgattgcttcgaacatagcaattgtctccggtttcagatagttgtcgaagataacgggaacacttgtttcacagtccagacctcgacgggcggcttctactttccattcgtcgctgtaaccgttgccatcgaagtggatagccttacattctttgatatatccgcgaattacttcaaggatagcggaaactttcggttctcccttttcgatcagagcgtctacatcctttttgaatttcatcagctgttctgctacggcagcgtttaatgcaatcatggcacttgcacagttggcctcagagcctacggcacggaactcaaaccggtttccggtgaaagcgaaaggagaggtgcggttgcggtctgtattatcaatcagcaattcggggatttggggaatatccagcttcattccctgttttccgctaaggttgatcagatcgtctttggtactgttctcaatatgatccaatacctgtgacaactgtttgccgaggaaagaagaaatgatagcgggaggtgcttcattggctcccaggcgatgagcgttggtagcgctggaaatagaagctttcagtaatccgttgtgacggtaaactgccatcagcgtattcactacaaatgtgacaaagcgcaggttatcttccggcgtcttgcccggtcccatcaacaggatacctgtatccgttcccagtgaccagttattgtgcttgccggaaccgttgacacccttgaacggcttttcatgaagcaatacacggaaaccgtgacggcggctgactttacgcatcaacgacatgatcagtaggttatggtcatttgccaggttacattcttcgaagataggagctaattcgaattgattcggagctacctcgttatgacgggtctttacaggaatacccagtttcaacgcttcaatttcaaggtctttcataaatgcggccacacgggtagggatggcaccgaaatagtggtcttccaactgctggttcttggcactgtcatgtcccatcaatgtgcgtcctgtcataagtaagtccggacgtgcggcatacaaaccttcatctaccagaaagtattcctgttcccatcccagataggcaacgaccttctttacctcaggattgaaatagtggcagacggcggttgcggctttatctacggcacgcagagctttcagtaacggtgctttataatcaagggcttcacctgtatatgcgataaatacagtcgggatgcaaagcgtatcatctacgataaatgcgggtgatgatgggtcccatgcgctatatccgcgtgcttcgaaagtattacggataccgccgttcgggaaagaagaagcatccggctcctgctgtaccagcagtttgcctgtgaactcttccatcatgcctcccttgccgtcatgttcgacgaaagcgtcatgcttttctgccgtaccttcggtgagcggtgcaaaccagtgagtataatgagtgacacccatttcgacagcccattttttcattccggcagctacttcatcagcgatgctgcggtctagcggggcaccattgtcaatagcgtcaatcagtgcgttgtataccttgcttggaaggtacttgaacattttttccttgttgaacacatacttaccgaagtattccgaagggcgttcggcaggtgttgctacttcaaccgctttcttcttgaaagctgtctctacgactctgaatcttagttttgacataatacctaatttgatttgttgttaaatatgttagagtaaaaattccttttttagcttagttataagcagattctccgtgttcgtagatgtcgagaccttcttcttcgacacgtgccggaacgcgaagtccgtgaatcttgtcgagtactttgaagataatgaatcccatacctgccgcccagactccgacaacaaccgcaccgaaaagctgggcacccaaaaagccggctccatgtccgtagaacaacccttcactggtagaaaacaatcctgtgagcactgttcccaagaaaccacaaaccccgtgtacggaagaagcaccgacaggatcgtcaatcttcaataccttgtcaataaagtcgactgcaaatatcatgactacaccacaaatggcaccgattaatactgctcctgagggagctacagcgtcacatccggctgtgatacctaccaaacctgccaaaacaccattcagtgtcagtgataaagacggtttgccatatttcatccagctcatcgccagtgcaaagaagccaccggcacaagccgccagatttgttgtcagaaatacatgtgagatggccattgcatccgcttcggtacttgctgccaactgtgatccggggttgaatccgaaccatccgaaccaaaggataaatacacccagtgcggcaactgtcaggttgtgtcccggaatagctcttgacttaccgtctttgccatatttaccgatacggggaccaagaatagcagcgcctaccaaagcaatccaaccaccaacggagtggacaatcgttgaacctgcaaagtcatggaatgtcgttccgaaaagattcatcatgaacgaaccttcttctccgttcatcagccagccgccaccccatgtccagtgaccggaaattgggtaaattagtacactgataaagatagtatagaccagatacatggagaacttggtgcgttccgccatcgctcccgatacaatcgtggctgccgttgcgcagaatactgtctgaaaaaccagaaatccttctctgggtaaatcactgtcgaggaatgacagatcaaagaagtgtggcattccgatgagacctcccgcaccaaacatcagaccgaaaccgatgaaccagtagagcaaggaaccaaacatgaaatccacaaagttcttcatcaaaatgttggcggtattcttgactctggtaaaacccgcctcaaccaatgcaaaccccggctgcataaaaaatacgagcattgccgcaagcagcatccagactgtattcaatcctaatgccagttccccgattgtatcgggagttgtttcggcagaagcagtggcggtttcagcaatttcaggtgtagttttgacttcagtaattgtctccgtagttgtcataaaagtatctgcatcaactgcttcctgtgcaaaagcactggttgcgaaacagcagaaaatgaacatagcagtggctatccacagctttgtgaagctgtgtctcttatatgttttatccataatgattatcttatttaatacctgtttttataatattatcatccgaaaggaaatctggccccggcaccttgccggttgccggttatcgttcctgttcggcgttatagagagcgatgtcgccacgttcggcggtgcggatgcggatggcgtcctcgataggaatgacgaaaatgcgtccgtcaccgatctctccggtttgtgcggctttgatgatagcctgtacggtcttttctgcatttttgtcgcgtactacaatagaaaccagaatacgttcgatggtgctggtatcatataccactccacgatagatacgtccttgccgtgctttaccgatccctcttacatcgtagtaagagaaccattcaatgtccgcttcgagcagagcgtctttcacgtcctcgaatttggttttacggatgatagcttcaatctttttcatataccttaaatattagtgttgacctgtaaaaagaagaggtatagggaggtggcagccatcgcaggttaccatacaacaaaccgataaaatctaaactctaactaccttcctgttccctatacgctctttgactatataaactctctctctcttaaaaacttaatccgaatgtgaagtaagcgccttccgtacgtggatttactgatactttggcaaatgccggaaccgagaatgaatcagtaaccctgatctccttgacagctccgagactgatgtcggaaacgcagaacccacttgtgtatccattataaaaagtcgtctcccaaggtaccattcctacatctactgtccagtcaagtcctccaaggctgaacggtgcactaagtgcgaggtaggaagaataagcccttttcccgttttctttaactccgtcggcacctgcaaagttcgtgtaccagttgattgccagcggaccaaaatcatatcctacctgtgcctcaaatacatgagcggttgaatgagcgccatatttgaaatacttgttggtaggtacctgagtgttgaaccagtaatccgttaccgagatgctgaaaccaccggttgaataaccgagagtcaaatcgaactctttagtatccgatgactcaaaccctaccgatccccatgctccgagtgaaagtcctttgtaagagattcctaatgaaggctgaatgctgactccgcctaaatcctgaccacgccagatataaccacttaccaagtctgctcctacggaggcttctactttatcctgcgccatcatattggatggcacaaggccgatcagtaataacgctgctgctatgcccctcaattttttgttaatcgtcgttttcatcgtctttttacctttaatagttagaaaaatgtggatgtacggtccagtgttatatagtagcgcgcaaaatactatcaaagccagttctttattcttctcattgcttccatacaatcattgtgatcgccgaatgctgtcagtcggatatatccctcaccgctggggccgaaacctacaccgggggttcctactacattggcttcatacaacatctgttcgaagaatcgccaggaagagagcccgttcggggttttcacccataagtatggagcattgacgcctccgtatactttcaatccggtagcttccagtccttccttcatgatcttcgcattgctcatataatagttaatcgtttctttaatctgtgctttgccttctgtactgtagacggcttccgctgcacgttgtgtgatgtacgaagtgccgttgaatttagtgcactggcggcggttccataatttgttgagtggaatccggtcgccttccagtgtggcagctgtcagttctttcgggactacggtatatccgcaacgtactccggtgaaaccggctgtctttgagaaactgcggaactcaatagcacatttcttggctcctttgatttcgtatatggagtgggggacatccgcatcctgaatataggcttcgtatgcggcatcgaacaaaatcagtgtatcatttgccaatgcatagtctacccacttttttagttccggtttggtcagtgtcgtccctgtcggattgttcgggtagcagaggtaaacaatgtctatccgtttgtcgggaatctccggaatgaagtcattctcacttgtacaaggcatataagtcacattactccatttgcctgttccttcttccagcactccggcacgtccgcacatgacgttactgtcaatatataccgggtaaatagggtctgttacaccgacactattgtcgtggcgaaggatatcgccgatatttccggtatcacttttggctccgtcgttgacgaatatttctgatggtgagaaatgaatgccacgtggagcgaaatcattctttataatagcttcaatcagaaaatcgtacccctgctcaggaccatatccgcgaaatgtatctttacttgccagctcttccactgctttgtgcatagcctcgatacatgctttgggaagcggctgagtgacatctccgatacctaaccggataatatcctgcttcggatgcgttattttgaatgtatttaccttcttcgctatatccgagaacaaatagctccccggtaatttcaaaaaatgttcgtttactaatgccatattgttattgttttaagtttctgcaaaacctgttacctattacctaatacttattacctatccctccatctccccatcaaaaactttagttgccggtcctgtcattaatatgtgtcccgttgcttcttcccactcgatggtgacggttcccccatccattattatatcacattttcttcctgccaatccatggagaacagcggctacagccgtggcacaagcgcctgttccacaggcctgggtgattcctgaacctctttcccaaactctcatccgaatggtgtctttacctacgatctgagcaaactctacatttgtcctgtccggaaagagatgataattttctaactgcggaccaatttccggcagattgatttgggtaatatcttctacaaaagttaccagatgcgggtttcccattgatacccgggtagactgaaaaggaaattgatcgccgaaatctaccgcttccgtttccagaggactacccatatctacagtgactgccgtcacctttcctccttctacatgtaatttcagaaccttaatgcccgaacgggtgtcaagcgtgatttcctttttggcagttaatccgtattcgtatacatacttgcctacacaacggcttccattgccacacatcattgcttccgaaccatctgcattaaatatacgcatactgaaatctgctttgtcagaactgccaatcaatataagtccgtcacttccaattcccgtatgaaacttgctccattcgattgctttcttttcaggggctgctatcggatatcgggtagtatctacatatatgtagtcattacctgctccatgcatttttgtgaacttaatcttggttgtcattttgttctttattaattggttgttgtatccttttgttttattacaatgcaaagatatgactttttgatttaacttttgatgaaaagatgtctaatctctatttattttatacgatcttacaatcgcgggaaataaagccatgttttgttataaattgaaattatgcatacctttatattaataaactgttatttgcttgatttgttttgcatatccttccataatatatgaagaatatttggggtaaatcagtccttgtattcgatctaaaatgtgaattttcgcttttacaataggtcgatatgctagtgattttcgcttttatatatcatattgcttgtttgcagttttgcagaacctttttgttatagcattgtttagttactaataaatataataatgtagcaatatggatatagagaaacaattggaagttgcggcgcagagcgatcatttggtattgattgtgttttatgccgactggtcacctcattacgaatggatagggcctgtgctccgtacttatgaacggagagtcattgaattgattaacgtgaatatcgaggaaaataaaactgtagccgattctcataatatagatacggtgcctgcgttccttctgttgcataaaggacatgaattgtggaggcaggtaggagagttgaccataggagagttgaaagaggtattggaagattttaaataagtcctgtttgaattttatgtaagaagcaccattatacagcaaataaatatgtataatggtgcttcttgtatctatcgaatatttgcaaaaagtttctgtcggctttttacattttctgagagtaactattttagtatttcctgtgccacagtcggctcgttggtcgtaatgaaatccaccttttggtctatgagccacttcatgtcttctgctttatctacagtccatacattgactttcagtccgagatcatgggcttctttgatccattcgggatgtttcttgattactcccatgtgatagtcgagtccggctgcaccgaggtctttcagttctttgggagatagctcgccgttgagatagaataccggagttccggcaggtgccaggcggataaactctttcatggcgtgcagtgagaaagtgatatattccatacggttttccagtcccatctttgttactagagcaagaatttcctgtacggctttcgtttcacgctttttgctgttaagtgcttttagttccaatataagtttggtattgcattttttaccggcttccagatactgttccaggctgggcaggttctctccgttcgatagtttcagtcctgtaagagcgtcacctttggaatactccatgtatttcatcttatagacagggtcatgattgataaccagtttattgtctttggtaagccatacatcaaattcggagccatagcaatggatagaatcggctttttgaagtgctgtgatactattttgcgcagaacctgctgttttccagtagccacgatgggcgataacttgcgacttttgcgcttggacactagctactgaaatgataagggcaaccattagaataattctttttatcttcattgatagtacatttaaaaagtttatgagtccaaaattataaaaaataaaacacagatcagcctgttattatgctaatctgcgttaattgacagctttttatgcatagaagtctatactttttattcctgactttacaaactgatgaatatatattcaaagatatgagtttatttcagacatctaaaatttttcaacaaatttattttactcttcggcataggcttcttcatgcactcctctcactgctctgccgcttggttcattcaagttacggaaagctacatcccatgccagcgcttctgctgtagagcaagccacacttggtacgcttggtacgctgcgggctgcgctttcactcggaaaatgctcttcaaagatactccggtagtaatattcttccttgttgagcggagtgttaatcgggaaacgttcggcagcgtgttccatctgttcatcactgacggcagccgctgtaatctctcttaaggtatcaatccacgaatatcccacaccatcactgaactgctctttttgtctccatgctacgctttccggtagcatatcggcaaaagcttcacgtacaattcgtttctcaatctcctttccggggcacattttagcttttggattcaacgccatcgctacatccagaaattccttgtccagaaatgggacacgtccctctacaccccaggctgataaactcttattggcacgaaggcaatcatacatatgcagttttgataacttgcgtgccgtttcctcatggaaatctttcggagtgggagctttgtgaaagtaaagataaccgccgaaaacttcatcggcaccttcaccactcaataccattttgatccccatcgatttaatcacacgtgccagtaaatacatgggagtggaggcacgtaccgtagtcacatcatacgtctcgataaaatagataacatcccgaatagcatccagcccttcctgaaccgtataattgatttcatgatgaaccgtaccgatatattctgccacttcacgtgcctttatcaaatcgggcgcccctttcagaccgatggcaaaagaatgtagttgaggccaccaggcgtcacttgctccgtctgtttcaatacgttttgctgcatattttttggcgatagctgaaatcacagaactgtccagaccacctgaaagaagtactccatagggaacgtcactcatcagctggcgatgaacggcatcttccaatgcttcttttacatcactggctttggcgtcattgtcttttacagactcatagtctgtccattcgcgtgtataccaacgcttcattttgccttctttactgtaaaagtaatgtcccggaagaaatggttcgtactcatcacagaatccttcgagtgctttcagttcactgccgaagtagattttgccatccttgtcttttcctatatataaaggtatgactccgataggatcacgtgcaatgaggaactcgtctttttcttcatcataaagtacaaaggcgaaaattccgctgatctcttccagaaagtggatgcctttatctttataaagggcaagaatcacttcacagtcgcttccggtctgaaaatcatattgtccggcatagcgggcgcggatatcccgatggttgtagatttcaccgttcacggcgagcgcttgtttccggtcgggggagtataagggctgtcctccgctttgcgggtcaactatcgagaggcgttcgtgtgccagaatggcgcttccacctacgtagataccgctccagtccggtccgcgatgacggattttctgtgccattttcagtgctttgtctcttagctctttggtttgagtttttatgttgagtatacctgctattccacacataactttgagtatttggaagttaatataatttgttgattctctgtttcttaaaagttggttcgttactatttattcgttttccctggcttttcctttcgtttgacctgggtcatcttttagttcaacctaggttgttgtttcgttcaacctaggtcaaacgaataaataatagtctataaacttcatggtgttccttgctgtaagggttacttcaccaaatagtgatctatgtccgcagcagcctttcgtcctcctgccatcgcccgtactacgaggcttgctccggtagctgcatctccggcaaggaatacgttttctgcaaatttcggttgttccggtttcaggaaccccatggccagcagcaccatatctgcttcgattacttctttcttccctgtgaggttcatggtcggacgtccgctatctgttgtcggtgtccattctacttcttccacctcgacgccggttactttaccgttcttacccaaaaactgattggaagtcaggcaccagcgacgggtacaaccttcttcatggctggaggtcgttttgaaaactaccggccattgcggccagggcgtagaaggattgtgaccgacgggaggtttgggcataatttcaatttgcgtgacgctggttgctccctgtcgtacactggttccgatacagtccgaaccggtgtctccaccgccgatcacaagcacttttttgcctttggcattcaccagtttgtctttggggaaagtttgtccttccagaatcctgttctgttgcgccagcatttccagtgcgaaatggattcctttcaactcccgtcccggaatgcttaaatcacgggcagtcgatgtacccgtgcaaatgcaatatgcatcgaatccttccggcaaatggttaacgtctatttctactcccatttcaaactgaataccttctgcagcaagtattttcatgcggcggtcgattacgtttttgtccagtttgaagtttggaataccgaaacgtaataatcctcccgcagcttcatctttatcgaataacgttacggtgtatccttttagattcagctggttggcagctaccaatccggccggaccggcaccgacaactgctacttttttgccgtttctttggggatgttgcacctgtatatatccttcacggaaggcggcttctacaatggcagcttcattttcacggatagtcaccggttggtcacaggatagtttcagtacacaggatttctcacagagggcagggcagatacgtcctgtaaattccggaaagtcgcaagtggatgacagcacttcatacgcttctttccattttcctttgaataaagcgtcctgccattccggttgtttgttgcctattggacaagcccagtggcaaaaaggtactccgcaatccatgcaccgtgatgcctgtaatttgcggctgtttgtattcaatgtctgttctacctgactatagtcagtgatgcgctcgctaacggggcggtatcccgcctcttgccgaggtatatttaaaaaagctttaggatctcccatcttgttaagtaataagtattaggtaataggtattaagcaataagtattaactatatggattaaagatgtttgaagctacggttaatacctaatacttaatacctaatacttgaattaatagtctctttgcatatctgctattttttgctgtaactttctcatctgctcttcctgtagtacttttttgtattcaataggtactatctggataaactgatctacgtaatggttccagtcatcgagcatggtacgtgccagtttcgaaccggtgtacaggtagtgctgacgaatcagttcgtgcagttctttgcggtaaccggcctcttcgatcagtgacagttcaaccatttccatgttgcagaagtagtcaaaattgccgtctttgttccatacgtaagccacaccgccactcataccggcggcaaaatttcgtccggtttgccccagaaccactacacggcctccggtcatatattcgcaacagtggtcgcctacaccttccactacggcaacagcccctgagttgcgcacggcaaaacgttcgcctacgcggccattgatataaacttcgccgctggttgcaccatagagcagggtattgcctgcaatcgtgttcttttcggcttcgaagttgctgcggataggcggtaatacggcaatgcgtccgccgcttaatcctttacccagataatcattcgcttcaccttccaatttgaaattgactcccggtacgaggaaggcaccgaatgactgtcccgcagagcctttgaatttcacattcagggtatgttccggcaatcccttctctccgtatttttgggcaatgacaccggagagcatggcacctgtcgcacggtccgtattggcaattgtgtattccaatgaaacttctttttcgtgttctatcgcttcttgggcagcatcaatgattgccacatccttcactgtagaaataccatgatcctgatcaatgacgtgacggatggctgcactgttatccacacgtgccagtagcttggtgaagtcaatcagagcgtgcttcggattcggatcgttttcgtcggatttgcgttcaatcaagtccgtacgtccgataatatcatccattttggtgaatcccatttccgccagatattcacggacttcctgtgccaggaaggtgaaaaagttgataagatattcgctgcgcccgtgaaagcgtttgcgtaattcctcattctgtgtggctactcctaccggacaagtattctggtgacatttgcgcatcatcacacatcccagcacgatcagggcggaggtggcaaaaccatattcttcggcgcccattaatgccattatgataatgtcgcgtccggttttcaattggccatcggcttgtaggacgacttgtccccgcagaccgttcagaaccaaggtttgctgtgtctcgctcagtcccagttccggagaaatgccggcgtaacggatggatgaagcgggagaggctcccgtaccaccctcggcaccggagatgacaatcaaatccgcttttgcttttgccacgcctgcggcaatggtacctacgccactttctgctaccagtttgacactgattttggcttgtggattaacgtttttcaagtcaaatatcaattgcgccaaatcctcaatcgaataaatatcatgatggggaggaggagagatcagtgagattcccggaatggaatggcgtgttttggctatgacgtcgttcactttgaatcccggaagctgtccgccttcccctggtttagctccctgcgctatttttatttgtatctcatcggcattcaccagatattcggcggtgaccccgaagcgtccggaagctacctgtttgatggcacttcgcatggaagtaccgtccggcagcgggtggaagcgggaagcatcttcgccaccttcacccgtgttgctgcgtccgtgaatggtattcatggcaatcgccattgcttcatgagcttccttgctgatagatccgaaagacatggcacccgtcacaaaacgacggagaatattctctatcggttctacctgttcgatggatataggattgcgacggaatcctaagaagtcacgcaggaaaataggtttctccttattgtctaccaaatgagtgaactctttgaatttcttgtagctgcccaagcgggtggcaagttgcaatgtactgatggtttccgggttccacgcatgtttctctccgtcctttcggaaggcatacagtccgttgttctttaataatggaaaattgaaagttgaaaattgagagttgccgtgcggtgcttcattttccattttcaattctccattttccattccttcaactccttcatcgtggaaagcgattgcgtctcttgccacttcctccaggcggatacctccgatgggggaaccgagtccgccgaaataagccttgctcaactcttcgctgagtccgacagcttcgaaaatctttgcaccgcgataagagcggatagtggaaatccccatcttactcatgattttgaacagacctttgcagatagatttgatatagtttttctcagcggtagcatagtccagttgaatatctttctcttttaccagcttgtcgaggatggcaaatgccatatacgggttcagtgcactggctccaaaaccgagtagtaaagcggcgtgcattacttcacgcatttctccgctctctacaatcaatgctgtctgcacacgtttgccgacagatatcagatggtgatgcacggcacttactgccagtaatgaagggataacggcatgagttgcatccacgtcacggtcggtcagtacaatgtagtttgctccgtccgtaactgattcctccgccattttgcaaaggttgttcagtgattcctgtaatccggctttccctttggatacttcaaacagcatcggtagttttacagtcttaaagcccttgtagcggatattgcaaagaatatccagctgtgtattgcttaaaatcggatgattcagacgtaccattttacaatgactctcgctgggagtcaggatattcatgcctaccgctccgatatattccgtcaaagacattaccagttcttcgcgtagcgggtcgatcggcggattcgtaacctgtgcgaattgttggcggaaatagttgtagagtagctgtggcttatcggaaagtacagccagcggcgtgtcattacccatagagtggatgggttcggcacccgcgctcgccatcggcataatcagtcgttcgatatcttcttttgaatagccgaaagtacggagcatccggtcgtagttttctacgtgatgaggcactttacgaccgcttttcagttcatccagttcgatacggttagtcgatagccatgtacggtaaggcttcgcttcggccagttgtttcttcaattcgccgtcatagtagatttctcctttctctgtatcgatcaatagaatcttgcccggttgcaggcggcctttttccttgatatctcccggctcaaagtccattacgcccacttcggatgccactaccatcatatcgtttttggtgatcaggtagcgggcagggcgcagaccgttgcggtcgagcataccacctgcaaatcgtccgtcgctgaaaagcaaggctgccggtccgtcccaaggctccatcaggatagagtggtattcatagaatgctttcaggtcttcactgatcggattcttctcgttgaaagattccggtacgagcatggccattgcatgaggcagacttaatcctgacatgaccagaaactccagcacattgtccagagaagcactgtcgctcatgcccggctgtatgatcgggcgtatttctttgatctctcccagtataggagtggagagtacgctttcacgggcttccatccatccgcggttgccacgaatggtattgatctcaccattgtgcgccagcaggcggaaaggttgtgccagtccccatgtcggaaaagtgttggtgctgaaacgggagtgtaccagagccagtccgctggtgaagtaactattcgtcagatcaggatagtagttgcgtagctgcaatgacgagagcatacctttatatataatacttttggtcgagagcgaaacgacataaaaatcgtttctcgtcggaatagctgacaatctgactttattctctatccgtttgcgaatcagatacagtttgcggtcggcggtttccgtttccgtaaaaccggtaataaagacctgcttgatatccggttcgttagccagagccgcttcacctagaatttccggacaggtgggtacattgcgcagatgcatcaatgtaagtccctctttttctatttcttcaataatgatactaaaaatagctgcctgatctttctcgttttttggcaggaaaagcagaccggtaccgtaccgtcccttttcgggtacgggaatgccttgcagtaaaataaactcatgcggaatctgtaacataatacctgcaccgtcgccggttttgttatccgctccctcagcgccacggtgacgcatattctctaatacctttaaagccgactcaacaatgtcatgtgacttttctccgtgaatgttcaccagcataccaaccccgcaggcatcgtgttcgtatgccgcatcatacaagcccatttgtccgggctgtcgttggtaggggatttttcctgttgcgttgttaaaaagttcttgtttcttcattctttttagctttattgtatgataatacctgcttgatgtatcaaattgttcggcaaagttagggatttaatttcataatgatagtatattgtttattttttgtgacacaaaataagataccttttctttattcttttaatttgtaatcaaaatgctctgatttgcttataatttatcagtctgtccggttttattttgttttgattgtaatttgtttctttttgagcttaaaataatatattatttaactttttgatgtgtttgcaacttttttatgtgcttatgtcaaataaatattgaaaaagttatctttgtgtcattttgaatgtgtatatttgcacccgaaataaaaatatcataatatgtgtggaatagtaggctatattggtaaaagaaaagcctaccccatccttattaaagggctgaagcgactggagtatcgtggatatgacagtgcaggggtagcattgatcagtgataaccaacagttaaatgtgtacaagacgaaagggaaagtctccgaacttgaaaatttcgtcacacaaaaagatatttccggtacagtcggaattgcccatacccgttgggctactcacggggaaccttgttccgttaatgctcatcctcattactcttcttccgaaaaactcgctctcattcataacggtatcattgaaaattacgccgttctcaaagaaaaactccaagccaaaggttacgtctttaaaagtagtactgatactgaggtgctcgttcaattaatcgaatatatgaaagttgccaatcaggtcgatctgcttactgccgttcagttggctttgaatgaagtgattggtgcttatgcgattgcgattcttgataaagaacatccggaagaaatcattgcggctcgaaaaagcagtccgctggtggtaggtattggtgaagatgagtttttccttgcttcggatgccacaccgattgtagaatatacagataaggtggtgtatctcgaagatggtgagatagcggtgatcaatcggggaaaagaattgaaggtagtcgatctcagcaatgtggagatgactcccgaagtgaaaaaagtagaattgaagcttggtcagctggaaaaaggcggttatccgcatttcatgttgaaggagatttttgagcagccggactgtattcacgattgtatgcgcggacgtatcaatgtggaagccaataatgtggtgctttcggcagtaatagactataaagaaaagttgctgaacgccaaacgctttattattgtggcttgcggtacttcgtggcatgcgggattgatcggaaagcatctgattgaaagtttctgccgtattccggtagaagtggagtatgcctccgaatttcgttaccgtgatccggtgatcgatgagcacgatgtggtgattgccatttctcaaagtggagaaacggcggatacgctggcggcagtggaactggcaaaaagtcggggtgcatttatatatggtatctgtaatgcgattggttcctccatcccccgcgctacgcatacggggtcgtacatccacgtcggaccggaaatcggagtggcatcgaccaaagcatttaccggacaggtgactgtgctgaccatgttggcattgactctcgcccgggagaaaggtacgatagacgagacacaatacctgaacattgtacgggaattgaatagcattcccggcaaaatgaaggaagtattgaaactgaatgataagctggcggaactgtcgaaaactttcacctatgcgcataactttatttacctcggacgcggatatagttatccggttgctttggaaggtgcattgaaattgaaagaaatatcgtatattcacgccgaaggttatccggctgccgaaatgaagcacggaccgatagccctgattgatgccgaaatgccggtagtagtcattgctacccaaaacgggttgtatgagaaagtacttagcaatattcaggaaatcaaggcacgaaaaggaaaggtgattgcatttgtaaccaagggcgatacggtgatcagtaaaatagccgattgcagtatcgaacttccggaaacaatcgagtgccttgatccgttaattactacggtacctctccagttgcttgcttatcatattgcggtatgtaaggggatggatgtagaccaacctagaaatttggctaagtcggtaacagtcgagtagtttaaaatgtaaatagtcaaatagtaagagatagattaatggaacaattgaaacatgaatgtggcgttgccatgatacgcctgctccaacccctggagtattacgagaaaaagtacggaacatggatgtacggtctcaacaagctctatctgttgatggagaaacagcataaccgggggcaggaaggggcaggactggcatgcgtgaagctggaagcaaatccgggtgaggaatatatgtttcgcgaacgcgcgttaggttccggtgccatcaccgaaatcttcgaagctgtacagagaaacttcaaggacctcactcccgaacagttgcatgatgcggcatttgccaaacgtactttgccctttgcgggtgaagtatatatggggcatctgcgttattctactaccggaaaatccggaatctcgtacgtacatccgtttttaagaagaaacaactggcgtgccaaaaatctggctctctgcggaaacttcaatatgacgaatgtagatgaaatctttgcccgcatcaccgctatcggtcagcatccacgtaagtatgccgatacctatatcatgttggaacaggtggggcatcgtcttgaccgtgaagtggaacgcctcttcaaccttgctgaagccgaaggactgacagggatgggagtcacccattatatagaagaacatatcgaactggccaacgtattgcgtacttccagccgtgagtgggatgggggatatgtgatctgcggcctcaccggaagcggcgaatcttttgctatccgtgatccgtggggtattcgtcccgctttctggtatcaggatgatgaaatagccgtactggcttccgagcgtccggtgattcagactgctttgaatgttcccgtagaaaaaatcaaggaactgcaacccgggcaggcattgctgatcagcaaagaaggcagactgcggacttcacaaatcaacaagcctcgcgagcggcacgcctgctcgttcgaacgtatttacttctcccgtggcagcgatgtagatatctataaagaacggaaactcttgggagaaaaactggttccgaatattctgaaagccattaataacgacttggaccatactgtattttcctttatcccgaatacggccgaagttgccttctacggaatgttgcaagggctggatgactatctgaatgaagagaaagtacggcagattgcggcattggggcatcatcccaatatggaagagctggaggtcattctttcccgccgtatccgcagtgaaaaagttgccatcaaagatattaagctccgtacattcattgccgagggaaacagtcggaatgacttggctgcccacgtatatgacatcacgtacggaagtctggtttccggtgtcgacaatctcgtgattatcgacgatagcattgtgcgtggtactaccttgaagcaaagtatcatcggcattctcgaccgtcttggtccgaagaagatcgtgattgtatcttcttctccacaagttcgttatccggactattacggcatcgatatggcgaagatgagcgaatttatcgctttcaaagctgccatcgaactcctgaaagagcgggatatgaaggatgtgattgctgccgcctaccggaaatcgaaagatcaggtaggattgccgaaagaacaaatggtgaattacgtgaaggatatctatgcgccgttcaccgatgaagaaatatctgccaagatggtagaactcctgacaccgaagggaacgaaagcgaaagtggaaatcgtctaccaaccgttggaaggactccatgaagcctgtccgaaccatcagggagactggtacttcagtggaaactatcccacgccgggtggtgtgaaaatggtgaatcaggcatttatcaactacattgagcagatgtatcaattctaacaaccatacaacgattcaaaaataagaatgagaaatgtgacattaatccttgacgacgggagccggttttccggtaagtcgtttggctacgagaagccggtggcgggcgaagtagttttcaacaccgccatgaccggatatccggagagccttactgacccttcctacgccggacagttgatgactcttacctatcctttggtgggtaattacggagttcctccttttaccatcgaacccaacggactcgccactttcatggaaagtgaaaagattcatgccgaagcgatcatcgtaagtgactactcttctgagtacagccactggaacgcagtggaaagccttggcgactggctgaaacgtgagaaagtaccgggcatcacaggcatcgatacgcgcgaactgaccaaaatacttcgtgaacacggagtcatgatgggacgtatcgtcttcgacgatgaaattgtcggggaaattgacaatggacaattgccaatggacaattacgctgccgttaattacgtagaccgtgtttcctgcaaagaaataatctcctatctccctgatggaacctcccaatgttttcctcttagcacttctattgcgcagcttaactctcaactttcaactttcaattctcaacttaaaaaagttgttttggtggattgtggtgtaaaaaccaatattatccgttgcttgttgaagcgtggtgtagaagtgatccgtgtaccttgggattatgattttaacggactcgaatttgacgggctgtttatctccaacggcccgggtgacccggatacctgcgacgcagctgtgcagaatatccgcaaggcaatggcgaacgagaaacttcccatctttggaatctgcatgggcaaccagttgctctcgaaagccggaggggcaaagatttacaaacttaaatatggacaccgtagccacaaccagccggtacgcatggtgggtacggaacgttgttttattacttcgcagaatcatggttatgcggtagacaataatacgctgggggcagattgggaaccgctgttcatcaatatgaatgatggttctaacgaaggaatcaaacacaagaaaaatccttggttctctgcacagttccatcccgaagctgcaagtggtcctacggatacggaattcctgttcgatgaatttgtaaacctgcttaaataaccgactatcatgaaagaaaatataaagaaagtattgctgctgggttccggtgccttgaaaatcggtgaagccggtgagtttgactattccggttcgcaggcactcaaagccttgaaagaagaagggattgaaaccattcttatcaatccgaatattgctaccgtacagacatccgaaggagtggcagatcaaatttacttccttccggtcactccgtattttgtagagaaagtaatccagaaagaaaagccggaaggtattatgctggcattcggcggacagaccgcgctgaattgtggagttgctttatataaagaaggaatccttgaaaagtataatgtaaaagtactcggtactcccgtacaagccattatggatacggaagaccgtgaactctttgtacagaaactgaacgaaatcaatgtcaagaccattaaaagtgaagctgtagaaaatgcggaagatgcccgtcgtgcagcgaaggaattgggatatccggtcattgtccgtgcggcttatgcgctgggtggcttgggctccggtttctgtgacaatgaagagcaactggatgtactggtagaaaaagccttttctttttctccgcaagtgttggtggaaaaatcgcttcgggggtggaaagaagtcgaatacgaagtcgttcgcgaccgcttcgacaactgtattacagtttgtaatatggagaactttgacccactggggattcataccggtgagtctatcgttattgctccgtctcaaacactgaccaacagtgaatatcataaacttcgtgaactggctatccgtattatccgccacatcggtattgtcggcgaatgtaatgtacagtatgctttcgaccccgaatcggaagattatcgcgtcatcgaagtaaatgcccgtctttcccgttcctcggccctggcctctaaggcaaccggatatccgttggcattcgtggctgccaaactgggactcggctacggactcttcgacttgaagaactcggtgacaaagactacttctgctttcttcgaaccggctttggactatgtggtatgtaagattccacgttgggacttgggaaaattccatggtgtagacaaggaactgggttcttccatgaagtcggtaggtgaagtgatggcaatcggacgtacttttgaagaagctattcagaagggcctccgtatgatcggacagggaatgcacggattcgtggaaaacaaagaactagtaatccctgatattgacaaagcactccgcgaaccgaccgataaacgtatttttgtgatctcaaaagccttccgtgcaggatacaccatcgatcaggtgcatgaactgacgaagattgacaaatggttccttcagaagttgatgaatataatgaagacttcggaagaaatgcacgaatggggaaataatcataaacagattgccgatctgcctgtggaactgcttcgcaaggctaaagttcagggcttttccgatttccagattgcccgtgctatcggttatgaaggtgatatggaaaatggaagcctgtatgtccgcaagtatcgtaaggctgccggtatccttccggtggtaaaacagatcgatacactggctgccgaatatccggcgcagaccaattatctgtatctgacctatagcggagtggcaaacgatgtacattatctgggtgaccataaatccattgtcgtattgggttccggtgcctaccgtatcggttcttctgtagagtttgactggtgcggtgtgcaggctctgaataccattcgcaaggaaggttggcgcagtgttatgatcaactataatccggaaacggtatctacagactatgacatgtgcgaccgtctctactttgatgaactgacattcgaacgggtaatggatattcttgagctggaaaatccgcatggtgtcatcgtatctaccggtggtcagattccgaataaccttgctttgcgtctggatgcccagaacattcacatactgggaacaagtgctcagagcatcgacaatgctgaagaccgtgaaaagttctcagcaatgctcgaccgtattggcgtggatcaaccacgctggcgtgagttgacatcgctggaggatatcaatgagtttgtcgatgaagttggtttcccggttcttgttcgtccgtcttatgtgctttcgggtgctgcgatgaatgtctgctccaatcaggaagagcttgaacgcttcctgaaactggctgccaatgtatcaaagaagcatccggtggtagtaagccagtttatcgaacatgcgaaggaggtagaaatggatgctgtggcgcagaatggcgaaatcatagcctatgcaatcagcgaacatattgagtttgccggtgtacactccggtgatgccactattcagtttccgcctcagaagttgtatgtggaaactgtccgtcgcatcaaacgcatcagccgtgagattgccaaggcattgaatatttccggtccgttcaacatccaatacctggcaaaagataatgatattaaggtaatcgaatgtaatctgcgtgccagccgttctttcccgtttgtcagcaaagtgctgaagataaacttcattgagctggcaaccaaagtgatgctgggtcttcctgtggagaaaccggaaaagaatctctttgaactggactatgtgggaattaaggcttcgcagttctctttcaaccgtttgcagaaagctgaccctgtattgggagtggatatggcttctacaggtgaggtcggctgtatcggaagtgacacttcctgtgccgtactgaaagccatgctgtctgtcggctaccgtattcctaaaaagaacatcctgctttctacgggtacaatgaagcagaaggctgatatgatggatgcagcacgtatgttggtaaacaagggatacaaactctttgcaaccggcggtactcataaaacctttgctgagaacggcattgaaagtacgcttgtctactggccgagtgaagaaggacatccgcaggcattggaaatgcttcataataaggaaattgacatggtagtcaatatcccgaagaacctgactgccggagaactggacaatggatataaaatccgtcgcgcggctatcgacctgaacgtgccgttgataacgaacgcccgtctggcaagtgcatttatcaatgctttctgtacgatgaccgttgatgatattgccatcaagagctgggaagagtataagtaagaaataataaattgttgtataataagttggaaaagtcgttcccgtgcattcgggggcggcttttttttatgaatttctgtttttgggatggtgtcactataagcatgggatagtgtcactatcctgtcagtatgcttacactatccttcctgtatagtgtcactatctttttttaatgtctataagttgcatgattggacaaattggtgtaaattgcgcaattatttcacaaatattctaaaacaggggagtaatatgagcatggataatcatatcgtaattatggctggtggcatcggtagtcgtttttggccgatgagtacaccggaatgtcccaagcaatttattgatgtaatgggatgcgggcgtacgttgattcaactgactgctgatcgttttgatggcgtctgtccacgggaaaatgtgtgggtagtgacgtctgagaaatatattgatatcgtccgggagcaattgccggagattcctgaaagcaatatccttgcagagccttgtgcacgaaacactgctccctgcatcgcctatgcttgctggaaaatcaagaaaaaacatccgaacgccaatgtggtggtgactccgtcggatgcattggttatcaatacaggtgaattccgccgggtagtagagaaagcacttcgttttactgacaacagcagtgctatcgtaacgctgggtatcaaaccgactcgcccggaaaccggatatggatacattgctgccggagatcagatcatgactgataaagagatttttacggtagatgcattcaaggaaaaaccggacagggagactgccgacagatatctggccgagggtaattacttctggaatgcaggaatttttgtatggaatgtgcgtactatcacttccgtgatgcgtgtatatgctccgggcatagcgcaaatcttcgatcgtattttccccgatttctatacggagaaggaaaatgaaacgattaaaaagctgttccctacctgcgaagctatttccatagactatgccgtaatggaaaaagcacaggaaatctatgtacttccggcttctttcggttggtcggacttggggacctggggagcgctccgcggactgttgccacaagataaatccggaaatgctacggtaggggccgatgtccgtttgtacgaaagcaagaactgcatcgtacataccagtgaagagaaacgggtcgttattcagggcctggatggatatatcattgccgagaaagataatacactgttgatctgtaaactggatgaagaacagcggataaaggagttttcaaagtaatcctttaattcttctgatattcctgaggcgtcattccggtcattcgtttgaaaaacttgctgaagaaagacggattgggaaagtttaattcatctgatatctgataaacaaggcggttgctatgttttagcaatactttagcctctagtataatggactggtttatccagtccattactgtttgctggctagtttgccggattacagtgttcagataacggggagtgagacaaagtttatccgcatagaaactgacattccgttctgtcttgctataggtgttgaccaaagaaatgaagcgctgaaaaatgtcgttttgatgggttaacggactgagttcggcctgccctttgcttttggctatatactctatattatatagtaatcctgccagtaaatgctgaatgacctcttttctgaatactggttcttgcaatacactccacatgaccgtcacaaaattctctatctgtatttgttcttcggtagacagtggaaacaggagatttttcttttgttggaggaaatgggtgaagaattcttcctttccggatatcggcagaaagttcaggtctactgccatcatgtgagcatcaaaatcgtgagatacttctatgatttgtatgatagagttgggagctatcagggatatatggtcgggcaggaaaatatattcaatcaaattgattaaaacacgtgccgagccattagtgacaatagcaatacggccttcctgtagtcggtacggttgtccgacactgaagatagtcgtttccatttttgagaaacttgtcacaaagccgaattcggcattgatgaagcgaaattcgttgtgacgtactatatttatatccttcaacagttggaggcctaattccatcggtttcttctgttccattttctcagttcttttccggcaaagataagaaatagcccttgaatcttctctttttttaggatgaatcgaactattgggacatattttccaactatcagaatgtgaaactattacttaaaggtctatctttgtctatctttaaattcatagaaaaaatgcgtatgaaaagaattatttttagtctttcgcttttactgttcatggccggaatatatgggcagaccggacatataacactggaagaatgtcagcaaaaaacgcaggataactatccgttggtgcgtcaatatgatttagtggagaagacgaaagaatataatctggaaaatgcggtgaggggatacttgcctcagtttgctctttcagcaaaggcttcttatcaaagtgatgtgacggagttgcctattaccattcccggtgtggatatcaaagggatggctaaagaccagtatcaggtgatgctggagttacagcaacagatatgggatggcggaggaatccggatgcagaagaaaaaggctacggcggaagcggagatcgacagggaaaagttgaacgtcgatatgtatgcgttgaatggccgtgtgaatgatctgtattttggaattcttatgttggatgagcagttggctcagaatgccttgctgcaagacgaactgggacggaacttccgtcagattacggcttatgtggaaaatggaatagctaatcaggccgatctggatgctgtgaaagtggagcagttgaatacccgtcagaagagagtggagctgactttttcccgtatggcttatttgaagatgctttcgttattgatgggagaggtgctttcgccggagacagtattggagaagcctgttcttcaaaacgaattgtcggctgtcagtgagattcaccgaccggagctgtcgtggtttgatgcacaaggggccggtttgcaggtacaagagaaagccttgaatgtgcgccatcttcctcatatcggattgtttgtgcagggagcttacggtaatccgggattgaatatgctgaagaatgaattttctccttattatattgcaggtgtccggctttcatggaatttcgggagtctgtatacgctgaagaatgaccgtcgggtgattgaaaataaacggaagcaactggatagcaatcgggatgtgtttctttttaatacgagactggaaatgacgcagcaagatcagtctgtccgttcgttggagaagcagatgcaggatgatgatgaaattatccggttgcgtacgaatattcgtcgggctgcggaagccaaagtagcgaatggtacgttgacagtaacagagatgctcagagaactgacgaatgaaagtcttgcccgtcaggcgaaggcaatgcatgagattcaacgattgatgggtatctatcaattgaaatatactactaatcattaataaaaatctttcggatatgaaacgaatgacaaaaataggaatatacgggatggcagtatggttgctttctgcctgtgggaacggaacgcccgattatgatgcaacgggaacctttgaggctacggaagtgattgtttccgccgaagcggcgggaaaactgctgcaactggaagtggaagaaggaacgagattgaaagccggcgaagaagtagggctggtagataccgtccagctatatctgaaaaagttgcaactggaagcaagtatgaaatcggtggaaagccagcgtcccgatctggccaaacagatagctgctaccaaacagcaaattactacagcgcaaagggaaaagaagcgggtagagaacctgcttgctgccggagctgccaatcagaaacaactggatgactgggatgcacaggtaaccttgcttcagcggcagttgattgctcaggaatcctcattgatgaagagtacgaacagtctgacggaacagggaaattcggtcggtatacaagtggcacaggtggaagaccagttgagcaagtgccatattcagtcgcctattgaaggcacggtgctggcaaaatatgcggaaacgggagaactggcatccgttggcaaaccgctgtttaaagtgggtgaggtagaccggatgtatttgcgggcttatgttacttcagagcaattgtcccaagtgaaattgggggatgaagtgacggtgtattccgattatggaaattcggaacagaaagcctatcccggtgtggtcacttggatctcggaccgttcggagtttacccccaaaacgattctgactaaaaatgaacgtgccaatctggtatacgcagtgaagattgccgtgaaaaatgacggttcgttgaagattggtatgtatggaggtgtggtatggaaaaaggagaacccatagtcgttgtaaaggaagtcagcaagagctacgggaaagtagaggcactgaaagagatttcttttgcggtaaagcagggagaaattttcgggctgatcggtcctgacggggcggggaagagtaccttattccgcattctgaccactttgctgctggctgataaaggtacggcaactgtcaacggactggatgtggtgacggattacaagcagattcgtacgaaagtaggatatatgcccggacggttctcgctttatcaggacctttccgtagaagagaatctggaattttttgctacggtatttcatacgtcgatacaggaaaactatgatttaattaaagatatttatcagcagatcgagccctttaagaagagaagggcaggtgctttgtcgggaggtatgaagcagaagctggcattgagctgttccctgattcataaacctgatattttatttctggatgaaccgactacgggtgtagatcctgtgtctcgaaaagaattttggcagatgctccgtaatttgagaaagcaggggattacaatcattgtttccactcctattatggatgaggctcgtcaatgcgacaggattgcttttattaatcacgggcaggtgcacggaatcgatacgcccgaccggattcttcagaagtttgcttccattctttgtccgccacccttggaacgggaggaggcgcaacagatggcagctcctgttatcgaggtggagcagctgaccaaatccttcggacattttacggcagtcgatcatatctcttttcaagtgcagcggggagaaattttcggttttcttggagccaatggggcaggtaagacgactgcgatgcgtatgctttgcggattgagccgtccgacttcgggagtaggaaaggtggcaggctatgacatctttcgggaagccgaacaagtcaaaaggcatatcggatatatgagtcagaaattctctttgtatgaggatcttaaagtctgggagaatatccgtctctttgccggaatttacgggatgaaggagatggagattgaagaaaagacagatgaattgttagaacgcctaggatttgcagacgaacgggatacgttagtgaaaagccttcccttgggttggaaacagaaactggccttttctgtctctatcttccatgagccgaaaatagttttccttgatgaaccgaccggaggagtcgatcctgctactcgcaggcagttctgggagctaatttatcaggctgccgatcggggaatcactgtatttgttaccacgcactatatggatgaagcggaatattgcaaccggatttcgattatggtggacggccagatcaaggcactggatacgccggcccggctgaaagaacagtttggtgtggagacgatggatgatgtgtttcaacaacttgcccgccatgcggtgcgtaaagcggattgattatgaaacaatttattgcttttgtaaagaaagaattttatcatattttccgtgaccggcgtaccatgctgattctgttgggaatgccggtcgtagagattattttgtttggttttgctatcactacggaggtgaagaatgtccgactggctgttcttgatccttcgaatgatatggtgactaggaaaatcatagaccggctggatgcgagtgagtatttcacagttactacccgttttcattctccgcaggagatggaagctgctttccggaaaaataagatagatatggcgattgtatttggagagcgttttgccgacggactttatacgggagatgcccgtgtacagctgatagtcgatgcaaccgatcccaatatgtctacctcgcagagtaattatgcagccagcattgtttcttcggcggggcaggagatgttgcctcccaatgtgtccgtttcgcgtttgactccggatgtcaaattgctgtataatccgcagatgaagagtgcctacaactttgtgcccggagtcatgggattgattttaatgctgatttgcgcgatgatgacctctatttccatagttcgtgaaaaagagacgggcacgatggaagtattgctggtatctccggtaaaaccattatttattgtactggcaaaggcagtaccttactttgttttatcttttgtcaatctgacaaccattttgctgctttcagtctttgtactggatgtgccggtagtggggagtttgttctggctggtgatggtgtctttgctctttattttcgtgtcgctggctttgggcttgctgatttcctctgtgacaagtacacaggtggcggccatgctggcatccggaatgatattgatgatgcctactatggttttgtccggaatgatttttccggtagaaagtatgccggtgattctccgggccatatcggacattattcccgcccgctggtatattcaggctgtgcgcaaactgatgattgaaggagtgccggttgtactggtacttaaagagattggtattttgttgctgatggcagtagggcttattaccatcagtatcaggaaatttaaatatcgattggaataaaggaatttattatgataaaatttctgatagaaaaagagtttaaacagttgcttcgcaattcgtttctgccgagattgattcttatctttccctgcatgatcatgttattgatgccttgggctgtgaatatggaaataaagaatatccagctgaatattgtagacaatgatcattcggtgatttctcagcggctggtgaataagattgcggcttctacctatttccgtctgacggaagtaccggcatcttatgaggatggattacggaatattgaactgggaacagcggatattataatggagatccccaggcacctggagcgggactggatgaacaaaggagaagcccatatactgattgcagccaattcggtaaatgggacgaaaggagggctgggcagttcttatctgggcactattatcaataactatgcagccgagttacgttcagaatatcctgatgccgtatctgcgtcgggcattgccccttccattcgtatcgatatgcagggattatttaacccgaatctgaattataaactttatatgattcctgctttgatgggaatgttgttgactttgatatgcggatttttgcccgccctgaatgtggttagtgagaaggaggtaggaacgatcgaacagattaatgtgactcccgtaccgaaatttacttttattctggctaaacttttaccttactggatcacaggctttatcgtattgactttgtgctttttgttagcctggctgctttatggaataactcctgtagggcatttcatcgtgatttattttttggcgattttgtttgtatttgttatgtccggctttgggctcgttatatccaattattcggcaactatgcagcagtctatgtttgtaatgttcttttttatgctgattctgatgttgatgagcggattattcactccggtgagcagtatgcctgaatgggcgcaggtgatcacttatttcaatcctttgaagtactttatggaaggaatgcgtatggtatacctcaaaggaagcagcttgttggaactgctgcctgaaataggagtcttgtttctttttgcactggggttcaatacctgggcggtgatcagttatcggaaaaatcaatagttgagaatttgattatataaaaaacagctcttatccttattggttggaaaagagctgtttttattattgttttcaccccttgggatgaatcgtggttactgtattattttacttcgatttgcttttcggccttcttcacttcttcttcagaaatcttaggaagttggacgctcaaaaccccgttttctactgcggcagaaattttttctttatctacattatccggcagaatcatggtctgctgaaacttagaataagagaattcgcgacgtagatagcgaccttctttcttctcttctttgttttcagtcttcttctccatggagataacgaggttgttgtcttcatcaatgcgaacattgaagtcctcttttgtcattcccggagcagccagttcaactttgtattctttttctgtttcaaaaacattgattgcaggtgcagttgcatttgcttttaccatccaatcgttatcaaagaaatcgttaaaaatacttggtaaccaactttgagttcttctaacaggcatcataatcttagtctcctatcttttagttaaacattcggtttattcactcttgaatttcggttcggtgctttccgcagaggggggcatcccgactcttactgtctgctttcgaaccgtcgttcactgctattagtgcaaaccttatgccaaaggaaatctgagactaaaaatgtctatttgtcattttaataatgccaattttgcctgtttggtgacaaaatgtaaccgcagtatatttattttatataatatagatattaatttgataatctattttttttcaatgagtttgaatcttaaccttaaagtttgcctttcttcatcgtaatcatgactgatgattttgaaggttcctacttctgaggtattggacacgtgtaaccctatacaggcgcaggcgtcataatctcctatgcgtataatacgaagagtctcactggcgtcagcaggaagtttgctcagatctacgatgtctttagcctgttcatgagtcataaattcaacagttacgggcagattttgactgataacttcgtttaccttatcttctatcgcttgtatctcctcatctgtaggacaagcaggaagaatatagtcgcacttactctttttcctttctatatgggcatttcttgagcgagggcaaccgaaagtttttaccatagtggcatttagtaaatgctctgctgtatgcataggtgcgattgacacatcctgaaacttgggacttggtttatttatttctatatttgtttccatattaattgatattgatgtaattaacagcgcaaagataatgaataatatggataagaaggtactaatctattgtcgtgttagtacgcaacaacagacaactgatagacaaaaagaggaattgttgaagtttgcagcagaaaaccattggaacgttgaagaagaggatattttcatagatgttattagtggttttaaaaagggagagttccgtcctgaatatgtgaagatgcttgaaagagttgaatatggggatattgatataattttattctctgaattttctcgtcttgcaagaaatgctacagagttattagaacaaatcaaattgtttatagataaaggtattaacttgtattttgataaacaaaaattatgggtaagagatagtaataaagatgtaggtagtattattttattgcatgtgcttgctgttatgtcaagctatgagatagaattgtttgttgaacgttcattaagtggcaagataacaaaagtgcaagcaggtcatggaggcggggatgaacgtgcgtatggttatatgcacaatgaaaataaacagattgttataaatcctatcgaaagtaagattgttacccgtatttttgaaatgtatgttggtggatattcttcaattcaaatatcagagatattgaatgctgagaaagtacctgctccatacgtaagaaaattgaatgagtacaagaagaatagagaagcaaaaggattggaggtgaaagagtataaatttgatacagataatttaaaatggcgtatttctacaataaacagacttatgcacaatgagttatataaaggtaatcgtagaataacattttataaaccagaccctaccaatccacttccgttatccgaaaggcaagatagagagattgtttatgaatattcggaacatgtggaaagtctgcgaattgtatcagacgagttgtttcagcaagcccaagataaactttccaaagcgcattataataagaataatgcagtcaggcatgagaatttattgaaacatttaatggtatgtggcgaatgcggtgctaatttttctgtagggaaatcaaatgaaacatctaaaaattatatcagtggtggacgtacttacaaatgttatggtagagtgaatcgtaaagataaaccacgaacatgcacgaatggggcagaacttcgacaatggaaattggatggacttgttttacagttgtcaattcaaatgtttgctgagattaatattcagcaaaccaatattttaaagatagaaaatttagggaaagaaatcgaagagttggttcaaataaaatcatcaaagaatacagaattggttgaagcggagaatctttataaaaagacacttaaacgtcttattgcgattgaagacgatgaggttgcaaagaatttgatttcagatgcaaaacataaatatgatgaaactaaaaacgtgttgaacaaaactatggataaattgtcacgagaaatcacaacaaagagaattactattgataatttgaagcgtttgaatgccaatcctttgttgattaataaaatggatgagattaggaaaaatagggatttgataaagactatggttgatgaatatattgataaaattactatatttcgtttacatgaactttggttgttggtcgtagtatcttataaaggaggtgaggagatgtggggaacaattaaatgcgctcgttataaaaaggaggagatgttttacagtgaattgcattgtcattatggtgttgaatttcaggggtggttacttaataatacggaacattgtttttcgtatgataaaagtacacgtattattacttatcatggtggaagtaaaatatatgtggagtttaaatcaggtgagtatgattatgatacatttaatcaaatgatacaagaaacaggatggatgggatgtttccctttttatgcttatgaagatagtgatgaaaatttaagcgtaccttttaatgaaaaatttagaaaatctttacaagagaacagaattgattggaaagcacacaatgacaaggtcttggaacgtttattatccaagtcataaataataatattcctaccgccgtaacccctcactcagggggaggatttttgtagtcccccccctatagtttgtaacgggtggatttctatagtggaatcctatcctgctattgccgaaatagggttatacagatataagccaacagtatttttagttgattgattattttttatattggttggaatgttgttttctttacaccattcatataatttactttttcctacttttaaattcagtgctttaaaggttgatagattttcttttagggatttggaacaatcataatataagccaattaattcattattgattttcccttttaccatatttcgtacagtcttagctgaaagattgtatttgatgcaatattgagggtttattatccattttcttttttctgtctgctgttgtttaatcattgttgagtatttgtcaatgttttcattatatgcattttctgcgatatcatataattcttgtttgcttattgggtccttgctgttattgatgtaatagtatagttcgttggctaaacagtgcagcaaatgttcaaattcaatttgtgggtacatatatttgcgtactatagcatttaaaaagagtttttttctacgcccgttcccgtctttaattttacatactctgttggagtaaacacaattaccattattaagttttgttttttccttgaaccaatatcttttgatacagcaatagttttcaggtattgtaatatatggaatatcttcattggcttcttccaaattattttcaaagaatggatatttttctctgtatttttctattaagtctttatgggaaaggttccaaaaattggtaatatattcatggtcctttatttcaactacaactttatctctcttttccatttgtaactgtatattgtatggtgttggcttttcttttatactgttagaaatggaaatatcatcataattataaatgataagattgtttataagtttacaatttgcgtagctccctaaataaaattggtagattgctctattatgattatctaattctatatttgttataatattatcatatagtatctgatattgattttgatttagtggtgtattgaaaatgtatagaagtctatatctgtttcctttagtaatatgtgaaaatgtggtatacgcaatgcttggctgatatttcaatgttactaataattcatcgaatgataataatgtattatcaatatcaaatactattatgttagtatgtaaagccctttcttttttcttataaccaaagagggattttatttccttgtcgatatatgtgcaagagaatatatatccttgttttataaattgctccaattcagaaatagtaatttccttttcttcaaaggatattttgttgtagtctttactggtaggtttttctgtgtaaccattgacggaaatcattagtttaaaagagaatttttcatttttgtacatgttaaggttgatattattgtgtgacttgtacgtgtcacttatttaggatgttaaggtttgatagttgaacaaaggaagcaatgtaaccttaacaaaccattacttccaagtatgcctactttcaactatataatataagcatattttgtttatgcaaatatacgactttctaatatctattaccaccttttaataagaaattttgcctgaaaagccctcaaaaagtacaagtatggtataaagtgtcttattattatctgatttttgcgatgtactatcaatttgttgtaatacaatgtgttatatgaaatataagtgactggatatatatccgaatgttaggtagcacactgtttgctatttattttttgcccctattccccgattttgacaaaagggttccttttcgaatgatgcactttgagttttgaaaagttttttcgttggataatccgtaatttcgtaaagaaccgtaggaaatcccaagtatatcaggcgaaaaatattcaaaaacattggctatgcttccgaaatagtggtgggtgtcgttctcttttatataaagatgaattactgtccgttctttcttctctttttcttccataatgcaatagttttttgcaaaaatagtaattgtgtgacataaaatgaataaatgtcatatttttaactatttctagtgtaaataaattgcatatattaaatatatgtcatacctttgcgttgtgattaaaacgaagacgatatgaaacggtataataaaagacaagtgatgaaagatgctcatagactttacaataacgattttcaacgcaggggacgttcttggtcggagtgtcttagagcagcttggagttgggaacgggatgcagtcaaagttctcgaagaaaaagcagcaaggcttgatgcaatgatagccgcaagttggaaagcgcacaacgaaagaaaagaagccaagacaaatgagaattggtataaaggaattgattcagaaactctttcttatgcaatgggatatggaagaggtaacaatttctattgtggtgactaattaaaagagttttttaatattcactaatataacttttgaatataagttgattataaatgctttaataataaattggttcgtgttagattcaaaaacaatagatttcaattaaaaaagaatattatgagcttaaaaaatagttatgttacttctgactatatggaatgggattcaatgttatcgctagttcacaaactatatagggataaggaatatcgtttgtcattgttaataggctgtggtagcttctttgggttacgtatatcagacattctcgctcttacatggtctatgttattagatgatgaaaagtttgttatcattgaaaagaagacaggtaagagacgggaaataaaagtcaattccaatttccaaaagcatattgcagactgtttcaaggctttggatatagtagataaagatgaaaaatgttttgttagtcgaaaaaaaacagtgtatagtacgcaacgaattaatgtgttatttaaatcaataaaaattaaatatggattgaagatagaacatttttccacccactcgatgagaaaaacatttggtaggaaggttgtagagaccgctggggaaaactcggaatttgctcttatcaaactatcggaattatttaatcatgccgatattcaaacgacaaggcgttatttaggattaagaacagaagagttgttagaaacgtatgatatgctcagtttttaaatctgtattttttaaaatccaaatccgatattaagataaaatcccagtttgttagtcctattggagtaacatataaatccctctataggtcccaatggactatcgtagccatatccaatacttgtcccatatatttttttgccttgaaggaaattggaaaactgattttgatgaatggcataatttcctgataaggtaaggtattgcttttcgtgaaatttatgtcttacttggatttgtgcatttcccaataatttcagggtggattctgtatgagtcagccctgaaaaaggtatttgttgctcgtaatgtggattatatccttctccaccgataacattgctgtacataaacggaataccatcattgaaaataaatcttccgtatattgtcggtataataaatgtatttagtgtgattggaaatatcttggtgacttgggcagcaagtgatgagtatgcagtgttagtatgcaaattggtatatattgtataagaaatattagttttcaaacctttagtaggaaaatatcttttgtctaaagtttcatatttcaattttgtatgataattaagaaataaattctttcgtttcattagtgttgcatcttcacttaccaatgttctataataccgatggtaatctaatgaagctccaacttccatttgaagatttcttgaaggtataatagagtaaatcagactgctagtattccgtataaaggttggattagatattttgtgtccatggctgtataaaaatatatcattgtacccaatttgatttgaaagtgttatccattgtggttttgatataggaagatgatattgggttctgagaaaagattgttttcctcctcttgccacaatttcggctttcccgattttctgtttattcaaattgatattaagaatcactgctgcaatatcctcgctatcgaatcttagtccaattcttagttgattatcattgcttggagcatattgcggacaaaacaaggggaatttggttttattgttttttttattatttactatgcctaccctattcttgattgataataatgtgttgtaattggcttttgcggcattttctcctcttataatgagagtgtctattgcggcttttgtaaaacttgcggcattatagttttctacatccacttttatataagcatctatatccttagtactttcatcaagcgatgattgacaaatcattaacataagctgattggctatccctgcaatggaatgcaagttgtccgaatctgataattcagattgtacatcaatgccaataataatatctgctcccatagctttgacaacatcaattggtagattatctttaaatcctccgtcaattaaaactttttgtcctgaatatatcggtgaaaaaacaacgggaacagccatacttgcacgcattgcctctgaaagtttgccaaagcgaatgacctctttttgatttcttaccatatctgtggcaatacatgcaaaaggaattggaaggctatcgaaattagttacattttgatagccttctgtaagttgatgtaataactgtgatatgttcttcccttttattatacctccattctttccactattgttgataggaaatgacataaggtatttactgtcatcggatttaaacggaaaaggaatttctttgcgtgaaactttatcggtaagtaagtctatccagtctgtttgtttcactattgtttctaattgttcggatgtataacctatagaatataatccaccaataatagctccgatgcttgttcctgcaatataatcaataggtatatttaattcttcaagagcctttattactccaatatgcgcaacccctttagctccaccaccacttaaaacgatacctaccttttttcgtggtgatgtgtagactaaagagaatggtaatattaataaaataagtgcaagtgcaattttattcataggaataatgaagccgcatttaatagttatacttgtgtgtaactactcaatttaaagttatttattctattgattaaatatttatggatgttggaaaggtaacactaccgttcaaaacaatactctttgaacccgatttgcacttataatctttaaatacaagtgtaactctaaaattttctaaatcccatttttcaattgcaacagtaccagaaacatactctttttcagaggaataccattcttcaagttttactaaaccaatcaatattttgcaatctttagtcacatcttttcctgttgccagctctgcacgatggtcagtggtaccttgaatatagaaatcggatgttgcatcatttatccaaaattcaaaccccgctgatactttaccttcgagatttgtaattttgacagaactaccatttactgttagtgttgatgtgaattctgttttttcattatcatcatcgcttgaacagcttgttacggaaattgccattagtagaatggtcaataaaaaaatagttttctttttcatttttcttttttttagttaaacacttcttgtataattgagattgcaaagataatacacgtacatgtacgctcaaaatatttccgcaataatctttcctttaccaatttaaataattggtatatatgactaatatagaagaatttgtaatacaaaaagtaaaggcgatgaggatggaaagaaagtggtcacaagtagaattggcagattacatgaatctttctcctagttttattgcagatattgagaaccctaaacggagagcgaaatataacctcaaccatttaaatgagttagctaaagtttttagttgctctcctaaagacttcttacctgatgtgccattaagaaatgaaaaataggtattggtataattttctattattatttattagtaatgtaaaataggtgttgaaatctatttgttttagagtggtatttgtctgatatttcgtaatgaaatcaaggagaatattgttatatttgattatatttgcaaaaaaatatatatgaatataggtattatacatttaacagatttgcatataggctcatctaataatcaatatagtggaaaaatttcagagatagtaaaggctatcaaaggggatttgctcgatgttgctgttatatatttagttgtaactggagatgtagtaaaccgaggtagtggttttaaagaagctgaggtctttttggataagttaaagaattctttagctcgtttttttaatggaatagatgtcaaatatataattgttccaggtaatcatgattgtaattttacacagagtaatcaggttagagatattattgtaaatagtattcaaacaacgcagttgagtgataatagcgttattgaatcatgtttgaaagttcaggatgatttttggagattttatgagaagataaccaagacatgcccctttaatagactagcgtatcaaattaaagatacaattaatgaaaagacgatttgttttaattgttataatacggcttggatgtcttcaataaatgaagaagttggaaaaatgtattttcccattgaacaaatacctttaactttgtctatggaagatggtgatttgatagtttctatttttcaccatccgttaagttggtttacgcctaatacagaacttaataatagaaaagaattttctaaattcttaaatgagagttcacatattcttatttatgggcatgaacatgatgatgaacattcgaaagttgaagatttgaagaccaaaacagaaacggtgtatattgcagggagagcttttcaaaatgaaatagatagaacttcaggttttcaggttattaatattgacgtaaatacaaagcaggggaaagttatatcatataaatggcagaaagataaatataccaatctagatgaactgttattagagtatgatagaaaaaaaacaagtaagaagtttaatcttaaaagaacttatttggaagttctggataatttgaatttacctctaaaatttgaaacaagaaaaaatgtgaaactatctgatatttttgtttatccagatttagaaaaaatatcttccaaagaaaaaaagatagatgaaatatatagttcgcaaaggttattagattctgaaactaaaataatatgtttagaaggagaggcgcaatcgggaaaaacaagccttctgaatatgctatatattgaatttcatgaacgaggtaaatatccactattaattgaagctaagaaattagtaaaaggagatatcaagcgtaatattcggcgaacatttgaagaacaatatgaatgtgatgacaatatttttgagaattattgtcagtttgataataaaaataaggtcttatttattgataatttacaagattatacttataattctcttactcttataaatgtaatcaaagaattagtatctttttttgataagattattattagtacaagtactctttttactttttcttcagtcataaaagcagaatttaaaagtattgattattattttattcaacctttaggatataaaaaaaggaatgaactgattgagaaatataatatattgaatgagtctcaacaaaccattactgaccaaattatattagaaaaaaccaaatattattacgaccaagtacaatctgttcttggaaataaattgataccttcatttccagtatacattctttcgattctacagactttgatatatgctactccacataatttagaacaaacatcattaggctattgttatcaatctttgttatatgtagctttaacagataaagcaaaagtgaagaatgaagatgtagattcgattttcaattttttatcagaattagcttttaatttgtatgaaacgggaaatgattctttttcaggacagtatttagaagatttttatgttttatatagtagtaaatatataacaaaagggcttgtgaagataatagaaatattgcttaactcaaatattataattgaggatgaagatggtgattataaatttcgctataactatattttttacttccttgtctcacggaaattggttgatattatacatactgataaaggtaaggagatagtacgtaatctttgtaataatttatctaatgaaaaatctgctaatgtattaatttttgcaactcactatacgaaagataacttcctgattgatgaagctactttttcattaatggttccttataattcatatgtaccagtgactttaaatacaaatgatgattattataagttgatagaagatattgtgaaagaaattagttctaatttgatacaagccaataagaatcctgtagaagaacgaattaaagaacttgaagctaaagatagacttgttgctaatacactaaaaaatggagaggataaatttgaaaatgaacaaattataactaacgaagagtatagcaattgtgtagaagaaatggttcatgctttaaaatctttagaaatagttggacaaataattaaaaatagaaaggggtcaatagataaagaaaaattgttatctattataaaggagttatacttcacagcttttagaacaataggtttttttggtgaaatgtctaaaatgtcccaagatgagttgaaaaagtctttgatgaataaaatagaagaaggagatacggcatttgctattgaacaaaaaataagtaacttttttagatatatgacttttcagcattgtttgggtatattttctaaggttgttttttctgttggtaacaaagatttgaagcaaatatttgatgatgttgctcaagatataaatactccagcagcaaaacttgtgacatttagtattaagagttgctatggaaaaatttctctaaaagaattgaaagttttagctgaagaatttaaggataatcatgttgcactttcaattttaagagcgcgagttagagcatatgtgtataataatcatatagaatataaagaaaagcaacggatagctagtactatgaatatgaaaatacaaggttaatttttttttgttcatgtattcaatttgtgatatgtatgcaaatcttgaagtataaatagtacttaatattcactaagaatagaaatgaatattaagtatatacgcatatgattgattattagttgtttatgcagtgttatgtaaaatcgtaatttgcagatattcactttcatagtatattgtatgtttgtgaatattaactttctaataggtgttgataatactgactttatttttttattggcttatatttttctaagcgagttgcgtaaaacaagtgcgcaaaagagtgcgtaaattgatttgcgtaagataaatgcgcaattatgattttttagtatatgatttaatgttctgtattatagttgattaattaaggatgtgtttgtttcgactgtatgcataggagggtactcctgtttgttgtgatcattgagttgaggttgttgttccataaatttttcaataactttttgtctttgatattttcttatttgccggatggcagtttgtacttttctcccaggaaatgcggttgcttatctatcgctaaatcgataaacatcttgacccttgcaaataattctctgatattggttttcaatcctgcatagacgtctacatccctggcattaaaaccgatggcggtaatcccattcttttcggcaagataaatagcccgctcattgtgaaatcgttgagaaatgatggtcagacgggtctgaccgaatacttctttagcacgcacaacagagtcaagggtacgaaaaccggcataatctaaatagatagacttttcaggaacacctttttgcataagcgctttcttcatttcttccggttcgttatactcttctttgcgattatctccactgataagaatataattaattttgcctgccttgtacaattcaaccgccgcatcaatgcgatagtcaaaatataaattgttattcccgctttttagcttgggagaggtgccgagaagcagacctacattgtttgcaggaatatcactgatttcagtatagatgcaggagactgcattcttcttgatggtccagtcgcagataaagatactgataacacaaagtatggcaattatcagtgtgatatagaatagcttttttttcattttccgaataattcactcatataatcaagggaacggctaatgtcgaaatacatttgatttccttcatagtactggcatttatcaaactctatcagatcacatttattgactagcgattgacctttcatgttctccatcttgaataacatattcagcagttggtattcgtcatttacgcagataaccttaaatgctgtctcttcgcttgtaccgtcacctgtaagcgcaatcatagtaagcaaggctgcgtatctctttgaatagtgttttatttcccggatgtctttctggagcaaaccggctattccgtacatattatatagtaattggagagacaccggattcttttttagtagttctttgccgatattataagcatcttcatacttttcttctttaatcaactttcggaaatcctgagaatcatccatacttcctttgtaagctggtgtgaatgaatacccgtaatatagcatggcatgatcttgccgggtgagtaaagtatcattttcttcaaaacgttgcatgagcttttggaactccgtgttgtgattagtcacatactctttgatggccggataatccacttttaatatttcttgtgcggaacaataaacctgaaggctaagtatgcttataaagaaaagggtaatgagctttttcatgacagtgtttttttagggtattatgattcacaaaaataccattcttttttaggaaaccaagcgtataggcataaaaaaaggagcaacgccttgctccaacctttgttaaccttaaatctaatactatgaaaaacacattgcaaagatacggacttctgtgaacttagcaaattaaccaaggaaaatcttatgttatataacatagattaagaattttccctttccgcttaacggatattcggtatttgatcgttcatataaagagtttttttatctttgcaaccaatttgaattactaatctttatactacgtatatgaaaaagaaaagactgggtcaatggatgttattggccatcgtttgtttgagtttctcagtaggagagacctatgcacagaaacatgagttcgctaattacaagcgttatgcgacagagaatgcggcacttgcacaacctgtaaagaaggaaaaaagagtggtctttatgggcaattccattacggaaggatgggtgaggacacatcctgatttcttcaaaacgaatggatatatcggtcgtggtatcagtggtcagacgtcttatcagtttttacttcgttttagggaagatgtgatcaatctttctccggcattggttgtcattaatgcaggaacaaatgatgtagccgaaaatacgggtgcttataatgaagattatacattcggaaatattgcatctatggcagaactggcgaaggcaaataaaataaaagtgattctgacttcagtattgccggctgctgaatttccgtggagacgggagattaaagatgctcctcaaaagattcagtcattgaatgctcgcatagaagcttacgccaaagctaataaaattccgtttgtgaattattatcagccaatggtggtgggcgagaacaaggccttgaatcctcaatatacgaaagacggggtacatcctacaggagaaggatatgatatcatggaagcactcattaaacaggctattgaaaaagcgctttaattatagatagagtgtagataaaaaatgccctttgataagatttcaaggggtatttttgtaggattggaagatgctaagatggggtatgggcataaaaaaaggagcaacgccttgctccaacctttgttaaccttaaatctaatactatgaaaaacacagtgcaaagatacgggcttttgcgaaatctgcaaattatttctcttaaataggtgtttttataacactaattagcaaaagcacgggtttcttatagatttattgatgtttataagccgtttatccccacttttctttcatcaaatcttccagtttcagcagctcgttccgatattgggcagcttcgataaattccagctttttggcggcctcctgcattaatttgcgggtacgctctatgctcttttccatttgagctttgctcatatattgtacgattggatcggctgcgatatttggtgaagaaggttccacataagcgtgtttttctttcagcagttcatcggcttcggaacttggactgccaaatacagacaagtttctcgctttcttgatttgttgtggggtgatgccgttcgcttcattataagcgagctgtttctcgcgtcgacggttcgtctcatcgatcgtaagccgcatactatctgttattttatccgcatacatgattactttcccgtttacattacgggcagcacgtcctgctgtctgggtcaatgagcgatgagaacggaggaatccttccttatcggcatcgagaatagcgacaagggatacttccggaaggtcaagaccttcacgaagcagattgacaccgatgagtacgtcataaacgccttgtctcaagtcatccatgatcttcacacgctctaatgtatccacatcgctatggatatagttacatctcacattattgttgagaaggtattctgtcagctcttccgccatacgtttcgtaagtgtcgtgacaagtacccgttcttctttttcgatgcgcagctgaatttcttccatcaggtcgtcaatttgattgagactcgggcgtacttcaataacaggatcaagcagaccggtagggcggatcacttgttctacaacgatcccttccgattgtatcagctcatattctgccggggtagcactgacgtaaatcacttgttttgtcatctcctcaaattcttcaaatttcagagggcggttgtccattgcggcaggcagtcggaacccatattctaccagattgattttacgggcacggtcgcctccatacatggcgcgaacctgcggcacgcttacatggctttcgtcaataaccagcaaaaagtcatccgggaagaaatcgagaaggcaataaggacgggtgccggcagcacgaccgtcaaaataacgggaatagttctcaatgccggaacagtgccctaattcccggatcatttccatgtcatacgtaacccgctcgtacaatcgtttcgcttcatattctttgccgatagattcgaagaacgctacttgtttggtcaagtcgtcctctatttcgtggatggcacgaagagtggcttccttggtggtcataaataagttggcgggatagatcttataggcttcgaaaggagcggtagtcaccccggtaatcgggtccacttcttctataccatcaatctcgtctccccagaaagtgacacgaagcagagtgtccgagtatgcaaggaaaatgtcgaccgtatctcctttaacgcggaaattgccacgattcaaatcgatatcattacggacatacaggctgtccacaagacgacgcagaaaaacattacggtcaagcatccgtccccgttcaatttcgattacatttttatagaaatccgacgggtttcccataccgtaaatacaggagactgaggaaacgactaccacatctttccggcctgaaagcagggaggaggtagcggcgagacgtaacttgtcaatctcgtcattgatggcgagatccttttctatataggtatctgaatttggcagataggcttccggctgataatagtcataatatgaaacgtaatattctacggcgttattggggaaaaatcccttgaactcgctgtataactgcgcagccaatgttttgttgtggctcaagatcaacgtaggcttgttgatgttggcgatcacattggcgatggtgaatgtttttcccgatccggtaacccccaataaagtctgtgcgggaactccttgaagtaccccctcagtaagctgagcgatcgcttccggttgatccccggtaggtttgtaagctgatgttagttcaaaattcatagttaaatcctaaaaagtggagcaatattcggcaaaataattgagataacaaatcatttttccaaataaatcctttactttgcaacatattaatatcatgaaacagattcatacaactaataataccaagagaacatgatttggaatgagaccattgagtgtatggaccgcgaaagtcttcgcaagattcaaagcatacgactcaagaaaattgtgtattacgtttatcacaacacgcctttttaccggaagaaaatgcaggaaatgggtatcacccccgatgatatcaatacgattgacgatatcgtgaaactgccgtttaccacgaaacatgatttaagagataattatcctttcggactttgtgccgtgccgatgagccagatcgtgcgtattcatgcctcttccggaacgaccggaaagccgacggtagtgggatatacccgcaaagacctttcttcgtgggcagaatgtatatcgcgtgcttttactgcttatggagcaggacgctcagatatatttcaggtttcctatggttacggactttttacgggtggcctgggagcacacgccggagctgagaatatcggtgcttctgtaattccgatgtccagtggtaatacagaaaagcagattacattgatgcatgattttggatcaacggttctttgctgtactccttcgtatgcactttatctggcggatgccattaaagattccggctatccgcgggaggaattccaactgaaagtgggagccttgggtgcggagccctggacggagaatatgcgtcatgagatcgaagaaaaactcggtattaaagcatatgatatctacggactgagtgaaattgccggaccgggtgtaggttacgaatgcgaatgtcagcatggtacgcacttgaatgaggatcattatttcccggaaattattgatccgaatacattgcagccggtagaacccggacagacgggcgagctggtatttacgcacctgacgaaggagggaatgccattgcttcgttatcgtacgcgtgacttgacggccttgcattatgataaatgctcctgcggacgtacattggttcgtatggaccgcatcctgggacgtagtgacgatatgctgattatccgtggtgtcaatgtattcccgactcagatcgagtccgtcattcttgagatggaagaattcgaaccacattatttgttgatagtgggtcgtgaaaacaataccgatacgatggaacttcaggtagaagtgcgcccggatttctattcggatgagattaaccgcatgctagcgttgaagaagaaactggcaagccgtctccaaagcgtacttggactgggagtcaatgtgaaactggtagaaccgcgtagcattgaacgcagcgtgggcaaagctaaacgagtgattgataacagaaaaatttaaaataggtaataggtaataagtattaggtattatcgtagctgcaacatagaatccatgtggctattacctattacctaatacttattacttaattaaaactttacgataatggtagcaaaacaactttctatctttttggaaaacaagtccggccgtttgacggaagtgactgaagtgctggcaaaagagaacatcaatctttctgccttgtgcatcgccgaaaatgctgattttggcattttgcgtggaattgtatccgatccggataaagcatataaagcattgaaagataatcattttgccgtgaatataacagatgtggtcggcattagctgtccgaatgtgccgggagctttggcaaaagtgctgggattcttgtcggcagaaggagtctttattgagtatatgtattcgtttgccaataataacgtggcaaacgtcgtgattcgtcctagtaatatggataaatgtattgaagtactgaaagaaaagaaagtcgacctgttggcggcaagtgatttgtacaagctgtaaccggacggcggaccataagcgaacggtgaacgaagaacggtagcgctggtataccaatgacatagcgcgcttgttgatcgttcaccgtttattattgactgtttatagcttccagttcgacgtcgttttttctcttttcgtcgatgtttaacgccttttatgtattaaaaaacatagattaattggttaattccccgcgaataagtaactttgcgcaatattttttaaaaggatgaagaaaaatatcattataactttgctcgcagcagcctctctgacatcgtgtggagagtacaataagttgctgaaaagtaccgattacgaatacaagtacgaggccgccaaaaactattttgctaaagggcagtataaccgctcagctaccttgctgaacgaattgattacaatccttaagggaaccgataaagcggaggagtctctgtatatgttgggtatgagttactataatcagaaagattatcagacagctgcccagacgtttatcacctatttcaacacttatcctcgtggtactttcactgaactggcacgtttccatgcaggtaaatccctgttcctggatactccggaaccacgtttggatcaatcaagtacctatcaggctatccagcaattgcagatgtttatggaatatttcccgaacagtaccaagaagcaggaagcacaagatatgatttttgctttgcaggataaactggtgttgaaagaactctattctgcaaagttgtattataatctgggtaactatctgggtaataactatgagtcctgtgtaattacagctcagaatgctctgaaagattatccttatacagattatcgcgaagaactttccatattgattctgcgtgccagacatgaaatggctatttatagtgtagaagacaagaagatggatcgttaccgtgaaacgatagatgaatattatgctttcaagaacgagtttccggaaagtaaatacctgaaagaggctgaaaaaatattcaatgaatcacagaaagtaattaaagactaaatttaaatagatttatggactacaaaaaaacgaacgctcccgctacgacggtaacccgtgacatgatggaactctgtgctgacacagggaatgtttatgaaactgttgccattattggtaagcgtgctaaccagattagtgtggaaattaaaaacgatctttctaagaaattagcagagtttgcttcttacaacgataatttggaagaagtattcgaaaatagagaacagatcgaaatttctcgttattatgagaaattgccgaaacctgacttgattgctacacaggaatacatcgaagggaaaatttattatagaaatccggctaaggagaaagaaaaacttcagtaatttattttctaacgaaagaattgatagtcaagtagtaagcgggaagcattttcctattccttattgcttggctattattgtttaacttaactactatagaatacttatgattcagcgaattcaaagtttttacttattgattgtaacagggttgctgattacagcaatgtgtttaccgatgggatattttattgacactacaggagaacatccttttaaagcactggggatagacgtgaatggaattttccagtctacttgggggatatttggtattctgatgctgagcgctctggtagcttttgcgactatttttctgtataagaaccgaatgttgcagattcgtatgtcaatcttcaatagtttgttgctggtgggctattatattgccttcattgctttttattttgcattgaagagcgatgccaatctgttccgtattggttgggcgctttgcttaccattggtgtctatcgttttgaatgtgctggctattcgtgctatcggacgtgacgaggtgatggtaaaggctgcagacagacttcgataagaatgcgggaagctctcgcattgggagttcctgatagaataaaacaggcgcgaatttcgcagactcacggaaatataaaccgtaggttcgagcgagattcgcgcctgatctttttgggtactgcttcttatttctttaaatcgaatagataagtaagcttcactgtaattgtgccatgagccgcacgggagaaatagtctttcttcgttgtgctgtaaaagtctgacagagcaaaataatagcgtccttcgagcagaaaactaccggctttctttgttctgaattctattccgccgcctccggctataccataatcgaatttgttctggattttatccccgtaaacagctttttgtgtgtttgtcagggtgttcatgtctatattctccatgctttcagattcaccgatcagaaggccgatctgaggacctgcattgataaagaactgcagtcctttttcattgccgaaagccaagtgggcgaggaagggaatgtcgagataggtcatctttcgggtgtacttgcgggtaggatcttctacggtctgcccattttcatccatgatttcgaataactcatcccagccgcgctgtgagatatttaactctacttgcgcaccacagatcattgcaaaatacttttcggaaatgtagcgtgccgtcaaacctccggtaatacccatcaatgagttctgtttgattttaggagtgaatgaagcactgtttaagttgacacctccattaaatccgacagaaaagttctggcgtggttcgccaatctgtgcggtggcaggaagcgcaaatcccatcatcagggaagcggcaatcagaagtgattttatctttgtcattttcgtgttattcgaagtcaagttttactaattcaaaattcttcgtgaagcggataaagaatactttcttattaatgaatcctccccagttgttgacacgttcgaatttgaatcctgtctgtatcggagtcagattcattttcggcaaattgttttccagttccgagccatagcgtgacaagcctttcaggaagaagaagcctgtgtcgaaaccaagcattccgtagcttggaaatttactcaccaagtccttgctataccatttgtgataattgttggtgaactgtatggcagccggaaacaatgtatttgtgtagaacgatgaatagaaataggtatccagttcaaagaaactttccaggtgatcccgggtatatgtctgccattcgggataaccgaacagatgaatattctgctctggagtatctctgaccagtagaatcagttgaggaagaaccttgattaacatgacatttttgccggaagtcggaatgaaaatattgtctttgtcagagcggagagcttccttcagcatatccttggttgcgttctcattgacggttttcattgatattcccttgctcttcagctcttgtttcatgccgctgataaactcggctttttctttatcttcgctggttggctcaataaagataacatgagcattggggaattgacgggtaaagtgttcgtatacttccgaatataaataggattgcggggtattaatctggtagatggcaggattattaaatacttcttccccttttgaagagaaaggaatcaccagtcgtatatcattcttttctgcaaaagtagataaaggtttgatctgttgctggtgcatcggaccgaaaatgacattcatgttcttcatctcatttttcgccagaatagtatttaatgtagaaacatcttttccacagtcatatacatacagatcaatagaagtacctgtacgtttcagactgtctaccgccatcaggaaaccttcgtagtattccaccatacgtttgtcttccagaaaaggcaatagcagggccgctttgatagtagagattgcctgaggggcttctttgctcttgcggaaaagctcattgttactgggggggatagcgtacggatcctctttgggagtcgtcggttgcatggtggttgcactgggataggggatacagaggtattgtccctttttcattccctttttcagttcgggattggctgcaatcaattcctgttcgctgattccatattcgcggcttacgctgaatacggtttctttgcgttttaccttatgcatatctttgcatctggattgtacaggtccctgtatagcgggtttttcagccggtgcttgtgcagtttccgtttcctgctcttgttccaacggaatgagaataacctgaccgatacggaagttttcggcgcttaatcccggattggcttcacaaatagcttttgcagatacattataaatggtagtcagtttgtataaagtttctccggcttgaatcgtatggaatgtttcccctttttggctttcttttcctttagggatttttatagcttgcccggcataaattttctcatcacatccgggattcagacgtatgatgtcgtttgttgtgacattatacatcttggcaatggagtataaactctgtcctttttcgatggtatgcaagaaataagattggttctcttgtgcataactaatagcgtatgaggcgcttataaaaagcaaaaataagaatattcggcttatcggtttcatcaatttataactattggttcttgaaatcaaggaacaaaggtacgaataatgccctatatcttcataagatttgagttaagaaaataatattgtgcttttttaggagcatatttcgggcggaaacattaattttgtaccgtttatgaaggatatgaatatgcaagaaacagaatatattaatgtgtatggtgcccgtgtgcacaatttgaaagatattgatgctgaaattccccgtaacagtttgacagtgattaccggattgagtggtagtggtaaatcttccttggctttcgatacgatatttgccgagggacagcgccgctatatcgagacattttcggcctatgcccgcaactttttggggaatctggaacgtccggatgtcgataaaataacagggctgagtccggttatctctatcgaacagaagactacgaataaaaatccccgttctaccgtgggaacaacaacggaaatatacgattatcttcgtctgctctatgcccgtgcaggtattgcttattcgtacctgtcaggagaggagatggtgaaatatacggaagaacagattctggatttaatcctgaaagattataaaggaaagaaaatatacttgctcgcacccttggttcgctcacgtaagggacattacaaagaactcttcgaacaggtgcgaaagaaaggatatctctatgtacggatagacggtgaactgcgtgaagtgacgcacggtatgaaactcgaccgttacaagaatcatgatattgaggtagtcattgataaactgatagtagccgagaaagatgataaacgcttgaaacagagcgtggcaactgctatgcgccaaggtgatggtttattgatgattcttgatgcgcagacagaaagtgtccgtcattacagtaaacgcctgatgtgtccggttaccggactgtcttatcgggaaccggctcctcataacttctcgttcaactctccgcagggagcgtgcccgaaatgtaaaggattaggcgtggtcaatcagattgatgtcgataaagtgattcccgaccgtgaactttccatctatgaaggagcgatagcacctttgggaaaatacaagaatgccatgattttctggcagatcggtgctttgctggagaagtatgaagctactttaaaaactccggtgaaggaattgtcggatgatgcggttgaagaaatattatatggttcggatgaccggatcaagatcaagagttcgctgataggaacttcttccgattactttgtaacctatgaaggagtcgtaaaatatatccagatgcttcaggaaaaggatgcttctgctaccgcgcagaagtgggcggagcagtttgcccgtaccactgtttgtccggaatgtaaaggtgcccggttgaataaagaagcattgcacttccgtattcatgacaagaacatcaatgacttggccaatatggacatcaatgagctatatgactggttgatgaacgtagatcaatttctgtccgataaacaaaagaaaatcgcagccgagattctgaaagaaattcgtacgcgtttgaaattcttgttggatgtaggattggattatttggcattgaaccgtagctcggtcagcctgtccggtggtgaaagtcagcgtattcgcctggccacacagattggctcgcaactggtgaatgtactttatatcctggatgagccgagtatcgggttgcaccagcgtgacaatctgcgtttgatccgctcgttgaaagagcttcgtgatatgggaaactcggttatcgttgttgaacacgataaagatatgatgctggctgccgattatgtgattgatatggggcctaaagccggtcgtctgggtggggaggtagtcttctcgggaactccgtcagaaatgcttcaaaccgaaacgatgacttcgcagtatctgaacggagagatgaaaatagaagtacccgccaagcgaagaaaaggaaatggaaaatctatctggctgaaaggagcgaagggaaataatctgaaaaatgtagatgttgaatttccattagggaagttgatttgtgtgaccggagtatccggaagtggtaaatcgacgttgattaatgagactttgcagccgattctttcacagaaattctatcgttctttgcaagatcctctggaatacgattctattgaaggactggaaaacatagataaggtagtggacgtggatcaatctccgattggtcgtaccccccgttccaatccggccacttatacaggtgtattttccgatatccgtaacttgttcgtaagccttccggaagctaagattcgcggttacaagcccggacgcttctcttttaatgtatcgggcggtcgttgtgaagcctgtaccggaaatggatacaagacaattgaaatgaacttcttgccggatgtgtatgtgccttgtgaggtttgccacggcaagcggtataatcgcgaaacgcttgaagtacgtttcaagggaaagtctattgctgatgtgcttgatatgactataaaccgtgctgtcgaattctttgagaatgtgccgcagattctgaataagataaaagtcttgcaggatgtcggtttgggctatattaaattagggcagtcatctactaccctttccggtggagagagccagcgtgtgaaactagcaacagaattgtccaagcgagataccggtaaaacactttacattctcgatgaaccgactaccggacttcactttgaggatatccgtgtattgatgggggtacttaataagctggtggacaaaggtaataccgtcattgtaatcgaacataacctggacgttatcaagatggcggattatatcatcgacatggggcctgaaggtggtaagggcgggggagtactccttagctacgggacaccggaagaggttgcgaagagccagaaaggttatactcctaagtttcttcgcgaggaattaggactttaatattgaagtataagtgtcggcttactaaaaagaaacaacaagatgaaaatcaataaaacgaatgcggcgcgtctgctggataaagctaaaatagcttatgaactgattccttatgaagttgacgaaaacgatctgagtgccattcatgtagctgccaacttaggcgagaatatagaacaggtatttaagacactggttcttcacggtgacaaaagcggttattttgtttgcgtcattccgggtgagcacgaagtcgatctgaagctggcagcaaaggcttccggcaataaaaagtgtgatctgataccggtgaaagaacttcttccgctgacgggatatatccggggcggctgctcacctattggcatgaagaaacattttcctacttatattcatgaaacctgccggcaatttccgtatatttatgtaagtgctggtgtacgggggctgcagataaagcttgcgccgggtgatttaatccgtgaatcgagggcagaaatttgccgtttatttgaggaataaatccaaaaaagtatatatttgcagaatatatgtcattagaaaaattatcaatcattaattaataaatttatatctatgtttgacaaacaccctaaaggactgatagcagccgctttagccaatctaggtgaacgctttggcttctatacaatgatggcgatcctcgtgcttttcttgcaagctaagtttggaatgaatggaaaagaagcgggatttatttattcaactttctatttttccatttacattcttgctttggttggaggtattatcgccgataagacacgaaactacaaaggaactattttcacgggaattgtgctgatggcagtgggatacctgttgttggctattccatccaagactccggtagacaatcagaccttttatctggtcattacttgcgccagcttgtttgtgattgcatttggtaacggattatttaaaggaaatctgcaagctttggtagggcagatgtacgataatcctaaatacgccagcatgcgtgactccggtttctccttgttttatatgttcattaatatcggtgcaatctttgctccgtttgcagcagtaggtgtacgtaactggtggttgtctactttcggttataattacgatgctgatcttcctgcattatgtcacggtcatttggctggtactttgtcgcccgaagctactgaaacttatcatacgttggtagagaaagcttccaacgctccggtacaggattatacagcttttgcatccgattacctgaacgtctttactacaggtttccattatgcatttggagtagctatcattgctatggtcatttctttgactatctatttgctgaataagagaaacttccccgatcccagcaagaaagctgctgcgtcttcagcatcttcggctactgtagaaatgagtactcaggaagtaaaacaacgtatgtatgccctgttcgcagtgttcggagttgttatcttcttctggttttctttccatcagaatggtttgactttgacttactttgcaaaggaatacactgaccttaacttgtttggtatgcctatttccgctgagttattccagtcgttgaatccgttctttgttgttttcctgactcctgtgattatggcaatctttgccagccagcgcagacgtggaaaagagccttctactcctaagaagattgcaattggtatgggtattgccgcattggcctttatcgtaatggctgtcggttcttattttgccaatctgcctttgcataaggacattatcgctgtaggaacttcaccggtgaaagtgactccgttcttgttgatgctgacttatctgattttgacggtagctgagttgtatatttctccgttgggaatttcatttgtgtctaaagtagctcctccgaaatatcagggtattatgcagggaggatggttaggtgcaactgcacttggcaatcagctgttggtgatcggtgctattttgtatgaatccattcctatctggatgacatggacagtgtttgtggtagcttgtactatttcaatgtttaccatgatcttcatgctgaaatggctggaacgcgtagcgaaataagcccgcttggtaataaataaacgaatgccccggaacattgattgaataacaatccgttccggggcattttgtatatggttaccttacttttcagatatccagtcccatgatataatcattcatatagtacccgttgccaatcggaaaatccccttcccgcaattttctcatacccatccgttcatagaacagtaaagccttgttgttacggttcacgttaagctccattaagcaaggttccggatgcacctccttgatatatctgacagcctctctgaataaaaaactaccgcagtgtgcgccttgaaaatgggggaggacatagattttctgaagatggaatacattctcttcctgttgctgtacggagacatagccacagggctcatccccttcatacgcaataaaataaacatgaccttcttcttccatttgtttccggatattttcgggagagtacatccagtccatcatatagtccagttgttcgggagataagatctcttggtaagtggcgggaaatacttcaccggccatttggttgatcagaccgcaatcatctatccttgcttttcgaatagtaaacatacgtattttcttttttgtggttttatgagctgcaaatatagctattatttctttttataataaggagaaaacttcttaatgatttaattattattaaattatagtactttgcaatgcaaggtactaaagtaatgcatatatttgtcctgtcaaaaagaaaaataacaatgaatgtagacaatgtaaaatctcagatgagaaaaggcatgttagagtattgcatcatgcttttactgcacaaagagccggcttatgcttctgatattattcagaagttgaaagaggcgcagctgattgtggtggaaggtaccttatatccattgctgacacgtttgaagaatgacgatttgttgagttatgaatgggtagaatccacgcagggacctcctcgcaagtactataagctcacagaaaaaggagaggcttttttaggcgagcttgagatatcctggaaggaactgaacgagaccgtgaatcatattgctagtagataattcgataaagaagaaataataatgaaaaaaacattgactgtaaatttgggaggaactgtctatcatatagatgatgatgcctaccgcttgctggacgactatctggccaacctgaaacatttttttcgcaaacaggagggggcggaagagattgtgaatgatatcgagattcgtattgccgagctgtttgccgagaaagtgtccgcagggaagcaagtcattaccattgccgatgtggaagaaataattgcccgggtaggcaagccggaagattttggtgtatctgatgacgaatccgaaccgcataagaaggaacagacagcttcttccggtcagggatatacacggaccactacagcccgtcgcctgttccgtgatccggataataagttgcttggaggagtagcttccggactggctgcttattttgactgggatatcacgctggtgcgtatcctgatgatcgtattattgtttgttccctattgcccgatgattatcttttatattataggatggattatcattcccgaagcacgtacggcagctgagaaactgagtatgcgtggcgaagcggtaactatagaaaatataggcaaaacggtgacggacggatttgaacgggttgccgacggggtcaataactttgtgaactcggacaaaccgcgtacctttctgcagaaagtaggagatgtatttgtgacgatcgccgctatcattcttaagatattcctggtagctcttgtcatcatttgctgtccggtattgttcgtgctcgctgtggtgatagtagctcttgtgtttgcggtgattgctgcgcttgttggcggcggagctctgctttatgaaatgcttccggctattgactggacgcccatagctaccatatctcctgtgatgacattgcttggcaccatttcaggaattgcactcattgccattccattaggagcttttctgtacaccataatgcgccagttgttccattggtcaccgatggggaccggcttgaaatggtctctgtttatcctatgggtattgggactggtcatcgtgattatcaatttgtcagctctcggatggcagttgccgttgtatggactgcattgcttttaatataagatcgttctattaaaaaagaataatatttattctttttctgagaaatgtgccccgatagtgtgtccggggtacattttttgtttgtccttctttgtaaatcgagatttttaattaagtttgtgaggacttattcaatagataaagaaaatgggtgaacatatatgtttcaggagaaacgaacgtttggctaccgtcaatccttattggagaggaaatccgatggtacgcggacgtttttttaacaggcagcaccgtttccgtcccggtatgggaagtgtgttgaaatggcggttgtcccccaatcctcagcggaaagaaaagaaaacggtgaagtgggacccgaaagtctgttatcttcgttcgctggatgctgtggtgggagattctttaatatggctgggacataattccttcttccttcagctggcaggtaaaagaatcatgttcgatccggttttcggcaatatcccttttgtgaaaagacagagtgagtttcctgccaatcccgacatttttacagaaattgattacctgcttatcagtcatgaccattttgatcatttggataagcaaagtatcacccgtttgctgaataataatccgcagatgaaattgttttgcggtttgggaaccggagaactgataaagagctggtttccggaaatgaaagtgatcgaggccggctggtatcagcaattggaagatgaggggctgaaaataactttcttgccggcacagcattggagcaaacgctccgtacgtgatggagggcagcgattgtggggagctttcatgctgcaaggaaatggtgtttctctctattatagcggagacacagggtattctacccattttagggaaattccggatctgttcggaactccggactatgccttgttgggtatcggtgcatataaaccccgctggttcatgcggcctaatcatatctccccttatgaatcactgactgcctccgaagagatgcacgcaggaataaccattccgatgcattacggcacatttgatttgtctgatgaacccttgcatgatccgcctaaagtatttgcggcagaagcaaagaaaagaaagattcgtgtggaaatcccttatctgggagaaatcgtaaaactaagtaaaagaaagtaattataaaatagactgagagatgaagaagttagaagtaaaagacctgaaagaaaatttctttgaggcgattggcaaagaatggatgttggttactgccggcaccaaagagaaattcaatacaatgactgccagctggggtggcattggctggctttggaataagcccgttgcttttgtttttgtccgccccgaacgatatacgtatgagttcatcgagaaaagtgattatctgacactttcttttttgggcgaagcaaataagaagattcatgcggtctgtggctcaaagtccggtcgtgatacggataaggtaaaagcaaccggattgaagcccgtcttcacagaacaggggaatgtgcttttcgaacaggcccgcctgagtctggaaggaagaaaactgtatgcggataacattaaacctgaatgtttcctggataaagactccttggaaaaatggtatgacgatgctcatggaggttttcataaaatgtatatagtagaaatcgaaaatatttgggagggagattaattctccctttttttattttttatcggtaaagctttgataagtgatataaatattatacatttgccctaaactaaactattgtaacacaactaaaactaagcgttatgaaaacaaaaatgttctttctttgggggatttgcgctgctttcgcagcttgtagtagtgattcggatgatggatcttcttttccatctaatactccggcaattttggaagtcgtttcctataagtttgtgcaggaagatacggatgtagtagagcgggttgaatatcctgttgtagtcttgcagcataaagtaaataataaagatgaacctcttccaatgatatatgaatgggatgtggaagaggaagagagttctttatttgtattgactgaaggttctttgcctgttaatgctgaaaatttggcggatttgaagattcctgttcctaccattgatgctgtaggtaagctttttatagacgggacgggtacaaagactccgttgatttttggagaaacattaaaagtaaagaatggatcacgttctattggaaatataaagtatgagatgcctcccaattcaacttatgaattaacaaaacaagaatgcgggtatcgatgtaccttaactttttatttgatactgaaggccgtaaataagggggaaggataccatttaaaaggcagatggactggagaacaattaaggaacaaaaaaatgacattgaccgatttctctgacgaaaaaggtgctgaaaaaactgttttaatggaggctccgattgagctatttgaaaaggattatgagacaagcctagattgaatcatagaccttatctaagtatatagtagcaatcgaaaatatatatcatgagtaaagtctagcggattttagatgtaatgcagaaggctctgaactcaatttgatttgagaacagagccttcattatttgttttatatcaaagatttattttgcaggagccttcagccatttatccagccactcaaagaaagtgcgttgccacaagacaccattctgcggtttcagtacccagtggttctcgtccggataaatcagcaactctgcaggtacaccacgcattacagcggcatcaaatgcggccatagcctggttagccaaaatacggaaatctttttctccatgaatacagagaatcggagtatcccatttttccacgaagaggtgaggggagttggcgaaagtacgctgtgctatcggattctgtttttcccagtacgcgccgcccatatcccagttggcaaaccatttctcttctgtttccagatactgcatttccatattgaagattccgtcatgagcgataaatgccttgaaacgtttatcgtgatgaccggctaaccaatatacggagaatcccccgaaactagcgcctacacatcccagacgatctttatctacatacgattcttttgccatctcgtcgatagcagtgaaatagtctttcatacactgaccaccataatcaccactgatctgttcgttccattccactccgaatcccggcaatccgcgacggttcggggctacaatgatatagtcgttggcagccataatctggaagttccagcgataagaccagaactggcttaccggactttgaggaccaccttcacagaacagcaatgtcggatatttcttgttcggatcgaactggggaggatagatcacccatgtcaacatatccttgccatccgtcgttttcatccagcgaccttctaccttacccatttccagctgatcataaatctccttgttctcctgtgtcagttgagtggcagaaccatccaatgctaccgcatagatctcatcacccatactcatcgaatgacgtttggcaatcagtttgtcaccaaagagtgctaccccttcataatcatacatacccgaagtaatcgcctttacagaatcattcgtcaggtcaagagaataaatctgagtttctccatgccatacacctgtaaaatagatggtcttggcatcgttgccccagacaaacgcatccacattagactcaaatgctttgctgacaaaacgtttctctccggtttccagattcatgataaacaaacggttcagatcagcttcatatccatcgcgctccatgctttgccatgcaatgtacttgccatccggagaatattgcggattggtgtcataccccttgttttcttcggtgatattatccgttttctttgtattcagatcatacacataaatatccgaattggtagaaacagcatattccagccctgttttcttgcgacaggtataagccactttgtccgaagttgtattccatgccagttgctcaatgccgccccaaggtttcatcggactttcgtatggttctccttccagtatatccacgatattggaaataccgttaccgtcaaagtctgccacgaaaggatgcggagcagttgtcacccattcatcccagtgcttatacatcaggtcggtgacaataatacctgtagctttcggcaggtccggatatttatcggcagtgctttctttggttttcacttgcgagatgaacagcagtttcttgccgtccggtgagatagaataaccctcgatgtcaccgtcgtagttggtcaattgtttacggccgctaccgtccggattcatttcgtatagttggctgcttccgttgtcgttgctcagaaaggccagcttcgttcctccttttatccaggtcacctcattctcctgataaggagtgcgggtgatttgccggttatcgctgccgtccgcgttcatgacgaaaacttcgcgattactcttgttctccggtacactgtagtatgctaccgtatacgcaattttctttccgtcgggcgataccgccagtcctccgatacgtcccattgcccaaagggcttcaggcgtcatacgcttcccttcgatcttaatatcggatttttcgataagcacctgatccgttttgcccgcgtcttttgttccgccgcaggcagctaacaacattgctgccgacatcataaatagatttgcttgtctcatattttataaaaatgtttattttcttgcgaagataatgaaaaaaggatttaaatctgctttttctgccagtttcctttcttcatataccagtagcagaagaggaggataaagattccatacacactttctgttgtccaggcaaacgcaatgtccattttaaggtaaagaataaaataagtagcgtaagctacataaattgtcagtacacaaagttccatggccagtgccgtgcgtgtgttacctgttcccgataccgactggaaatacacattggctggtaccagcactacgtaggctgcgcataacacccataaagaagggatggacgcagccctcaaatcgggcatatccgtgtatatacgcagaatcaggtcgggaaacagacagaagaatatcaatatcggcagtacgaacacatatccgatacggatgtgctgattgatggttccccgtacacaatctttttcgccggcaccgataaggttgctgaccaaagatccgcaggttgcagcaaaagccatggcgatcataaacgggatgcccgacacattccggataatgttcgcgatagccaatgaccgttctcccaggtgttccacgaacaggaagaacataaaccaggtagataaagaaacgaagttctgaatcattgtccacacggagacattgagaattcgcttcaatgtccggctttggaatttcggcaggatattcagcgcatacttcttgcagtcaatccgcttccaggtatagatgataaagaaaatcaccgataccagctcagcgagggatgaaccgatggctgcaccggcaatgcccagttgtgggaaaccgaacttaccgaaaatcaggatatagttgaatatcacgttagaaagcaccatcacgatggagttcagcgtcagcgtcttggtctgtgtcgtaccgacaaagaaggagcggaacatcactccgacaaatgagaaaaagaacccgtacacccgccaatgaatataactttccgctgcatcataaatgtgaggggacgaaatgatattctttaaaataaatggcgagaatacgatggaaagtgtaaacagaatcgcagcaaccactaccaggaaataaatcccctgatagaaaatcggtccgatttccttgtagtttccttccccgttgcgacgggcgatcaatatctgtgctcctacgctgaatccgaatgccatcatgaaaatagccaggtaataaaccccggcgatggcggatgcccctaattcaatttccccgacacgtccaagaaaggccgtgtccgtcatgccgatcagctgctccataatcaggctgatcagaatagggtaggcgatcgtccagatttgtttataagtatattttgtcttcatattaagtttgttttttagagaaagaaagccggacaaacccctttcggttgcccggctttctcagaatatatcttcggataatttcttatcgtttattctgtttttgctgctgtaactgttcctgttgcttttgcatagcttccaggcgtgcagcaaatccggtctttttcatttgtttcgggtcttttttcttagcttccagaatagccagtaattttgtttcgtctgtagtcttacgcaacaaaatcatggttcctacactaatcagtgttgacacgaaataataatagttcaatcccgaaggatagtcgttcagtacgaacaggaacataatcggcatcagatacatcatccatttcatcgcagccatttgtggttgcgctcctgtatcctgcatcgtcattgtatacttcgtgttcaggatgttggttaccgtcatcagcaagcagaacaagctgagatggttgcccaggaacggtatatggaacgggaatgtgatgaacgcatcgtaagtggacaagtcgtccgcccacaagaaactctgctgacgcaactcgatagcgctcggtacgaacatgaacaatgccatcaagatcgggaactgcaataacattggcagacagccgcccatcgggctcacgccatactggctgtaaaggctcatcacctcctgctgtttcttcatcgcatcttcctgcttcggatacttcttgttgatctcgtcgattttcggtttcaatacacgcatcttggcagaagacatgtatgttttccaggtagcagggtaaactaccaccttcaccatgattgtcagaatcaacagtacgatacccatgctcaagccccagcccgacagccagtcgaatacgttgatcgtgataaactggttgatccagcggattaacggccagcccagatataccagtctgttaagttcccatttctctgtacgtcctttgtccagtgccttcaaggtcttgaagtggttcgggccaaagtagaagtacatttctgtcggttgttttccgctcggatcgaagaaggtactcatttctgcagaataatccttgatatatccgcttccttgttgttccattcttgacttcacagaaaccttgttgaagtcctggtctgcgatgaatacagaagagaagaactggtttttgaatgctacccagtctatcgctgtattgcccagatccttttcgtcatccttggcagccgacagattatctacattgtcaccttttaccttataagtcagctctgagaggcggttttcgtaagtgaatcccttttccagctggcgtgcacgctgtgtccagtcgatgtctacatactccgtactggccagtttgccttccatgcctgttgctttgatttcaaagttcatcaggtagctgttcggtttcagcgtatagataaaatcgatgtagctggcgttgtccgcagccagacgcatagttacgctgctgtctgtcttattgacagcttcgaagtaatagtcctttgtctggatggctccttgcttgttgtagaagttgaaactcatggtagcatcatcaccgtcgaacagtacgacagggtttgtcttgtcctgtcctttgtattctttcagcatagccgaatatacccgtccgcctttcgtagtgaaagtgatttccgctacgctgttctggatgcttactttggaatcagttccatgcatcgcgttgaaaaacagggcagaagaatctgctgccgccgctgcacctttgttttcattggcgagtgcggcttctgtttttgctttcagcgcttcctgctgctgttgcaccacggcaatagaatcgtagtatttcttctgcgcagctatctgctcctcgcttggacggctcagataactgaatcctaccaataatatacctattaaaacgagacctgtaatggtgtttttatccattcctattaattatgaattataaatttttgaataataaattgtcaattgccaactgtcaattgtcaattcttctcgttctcgatggctgccttcacgaaagccacaaacaacggatgcgggttcaataccgtactgctgtattccggatggaactgagtgccgataaaccacttcaatgccgggatttcaacgatttccaccagatccgattcggggttgatacccacgcatttcataccagcagcttcgtattgagccttatagtcattgttgaactcatagcgatggcggtgacgttcctgaatatgttcttcgccgtaagcaaggtatgctttcgatcctttctgaagcacacattcgtaagcgcccagacgcatcgtacctcccatattggtgatcgctttctgttcctccataatgtcgatcacgttgtgcggagtcttttcatccatttcgcgtgagtcggcatcggcatatcccaatacgttgcgggcaaattcaatagcgatacattgcatacccagacagataccgaaggtcggaatatcatgtgtacgtgtatatttgatggcaacgaacttaccgtcgataccacgctgaccgaatcccggaccgatcatcacgcctgccatgccttttaaggcttcggctacgttctcatctgtcagtttttcgctgttcacaaagtgaacctccactttgcggtcgttgtaagtacctgcctgtgacaatgcttcacggattgacttgtaagcatcctgcaagtcatatttacctaccaatgcgatgttgatgggttctttcgtttcagcagcatgacggcgttccaggaatttacgccacggacctagtcccggagtttctcctacgggcagccccatcttttcaaggattgtgctgtccagtccctgtgcctgcatcaggagaggtacttcataaattgtttctgcgtcgatagactgcacgacagccttgtcatccacattacagaattgagctacttttttgcggagtccgtcgctcagcgggtgttcggcacgaagcaccaatacgtccggctgaatacctacgctctggagttccttgacagaatgctgtgtcggtttggttttcagctctccggcagcggcaagataaggcacatatgtcaggtgtacgcaaagagcgttcttacccaactcccatttcaactggcggatactttcgaggtaggggagtgattcgatatcacctaccgtaccaccgatttcggtaattacaaaatcgaacttgtatttgttaccgagcaattttacgttccgtttgatttcatccgtgatatgaggaatcacctggatcgttttacccagatagtctccgcgacgttctttgtcaataacacttttgtagatacgtcccgtagtgatgttgttagcctttgtagtctgaatacccaggaaacgttcgtagtgtcccaggtcaagatcggcttcatggccgtctacggtcacatagcattctccatgctcataaggattcaatgttcccgggtcgatgttgatatacgggtcaaacttctggatggttacattgtaacctcttgcttgcagcaatttaccgatggaggatgagatgatcccttttcctaaagaagaggcaacaccaccggtgacgaaaatatactttgtttctcccacagctataactgttttaattatttttacttagtagtttcttacgaacttaaaaagcgcaaaattataaaaaaaaggggaagaatgcagactttcccctctacaattttattaaaaaatgcaattttgaaagattcctatgttttctaaacaaaataatgtagatttgcaccaaattaggaatattatgagaagagagttattatcattcgtagtttttacctcgactttatctttatcgctttcagcacagaccgccactcaaccttctaccgtagtggcaaaagcgaaaattgtgaaggcagacacgctttcgtcagaacttcagaagtatttaatgcttaaattgaatctgtccggagaaactcctaaattggacactgtatcaatcttatataataagtatatcggtcagttggactacctgaatgacccgtctgtaccagaacgttatattccgtccgatcctgactattttcgtctgtttactccgttagcctattattatgctccgatggcgcagtattcaaaggtggattggaaaccggtacagtttgactctttgcccgacaacttgaataagttgacagcggaacttcttccttatgatactttggcatatacgaagtccgagcgtgccaatcaatcggtcaataaagcactgatggctctttatctcaatcatccggaactggttgtcaccacggaaaaccgtatcatgagccgtgatgtctttcgtagggatgtgaaaccgaagatttctccgaaggcatctgttgtccatcttttccagccggaagaaatgagcaacgatgtgggcaaggcaaaaatgaaaatcagccgtcctaactggtgggttaccggaggtaacggttctttgcaaatcagccagaaccacctttctgagaactggtacaagggaggagaaagtaactttgccggtctggctaccttgcagctttatgccaattacaatgataatgagaaagtccttttcgaaaatcagttggaggctaaactgggtatgacatccacaccgtcggataaattccatgattacctgattaataccgaccagttccgtctgtacaataagttaggattaagagcgttaaagaactggtactatactatttcttccgagtttaagactcagttctgccacggttacaaagccaatagcgaagaacttgtttccgcattcctgtctccggcggatttggcagtcagtatcggtatggactacaaattgaataagcagaaattcaatctttctgttttcatcggtccgctgacttataacttgcgatatatcgacaattcggaagtagatgaaaccaagttcggtctggagaaaggcaaatgctctaaaaacgacttcggttctcagttgcagtcaacgttcaactggaaaatcatttcggctgtttcgctggaatcccgtctgaactatctgaccaattacgaatgggtacgtgtggagtgggagaatacattcaactttgttttgaaccgctatctttctactaaactttacgtacacgcccgttttgacgacagttcaaaaccaaccgttgaaaatggcagctttttccagctgaaggaattgctgagcttcggtattaactataagtggtaatttttttaggcacggattacacagatttcacggtttcaggaattgagtaactaaaaaccgtgttaattcgtgtaatccgtgccttattttatctctatgtcctcaacgttgaaatgatataccttcccggattatcaatctttccccacttggtggtagacagcgtgatccatatctgcgtccccttctttccgtaatccgacagcttgagaatagctgtaatttctttcttgtttgttactccatgttgtgccaggctgtccagaagtcctttgacgttgtgcgtactcttgttgtaggcataaccggggatttcgagcgaaggcgaagccgtattgtcttcttcctcttctgcttttcttttctctcctttactttgtccggaaatgtcagcaattttgggtgaaatgttctcattttccagtttcaattcaccttgtactgacgaattgtttgcatcctttgtattattttccttttcctgtttttgggtgtcattgaccaacaggtagggcaaatcttctaactttcttttcctgcggcaggtagcatctatccagatgtgctgaatttcaagggaagtcaatatctgaaacttctcatagctttctttgtcaaagaatcctttgtcaagcaaaatttgaatgattccgtctatctcttttcctttcagttctcctcccagtttgcgggcaaaaatcaacgattgttcctcaccccatgggatgtaatatccttctttgaatattttacatagaagtttgcatacagctccatccactctgatgccatatttggcttcagccagttcaatggcatctctgtcgaaaaagtttacggtaagcggaaaatagtctacgcttaaataagttgtgctcatatcagtcttattgtttgtttttaagtttatacaattggtttccaatcgagaaaattctcaatctgaaaggttctccatcctttctcttccatgcaccagaatatgaaggtactgtgtatctgcttcatgtcataagagtggtgaaagtctttggaataagaaatgagagttcctgtaactaactgaaaactaccgttctgtctataatatgcgatgatggcatggccatattgcatgtagtctgccagtgatttcactttttcggctattcgttctgcgatcgtttccgaataacctttctctgatacgatacgttttttccatacttctgttaatcgatctctttcttcttctgttttgttagtggctatcagccgtttttcttttgtcattacattataaatttgttagtaaaatagttatatttaaagaaaaggcggaactatctgtaggatgcttacactatcgtgcgatgatagttacactatcctgccgggatagtgacactatcttgctgttatagtgacactataatttctgcaggataattcgttcatttctttatctaaaaaacgggggcaaaagtataagttgtattttttcgctccaattattcttgctattttctactgtgatactttgatttgtattgttctttctcttctttttcgtgcttcgaaattattccgattcctttgcttaaactgctaatttcgctgagtatactcctgaatttcattaatctatatccatgatgtgtgtttacgtaaaagattctccagtctgcaatgtacttggctagtcctgttaaagattttacgtaggaattaaactcgtcatcttcgtaataagtgcgaagacaggcaatgaaatagtgttttttttcgcctgtgatgccatttctttttctaacctcatcgatgtcaataatttcgtcatcatcctgataatcagtttcaagacttctcttcttttgtgtgccagttgcatttttcaggcatttttttgtcgttgtcatttcttttgatttaaataaaattaataaatggcattaagatggaaattccaaattttcgccctataattgtatataaaataactagtgatgcaaataatgaataaaaatggatttagccgatgtggggaactatacatcggccttttacgaaaagaaggtcgtttttctacggcacatgtctatcaaaatgctcttttctcttttaataaattttgtggtaatgccagtgtatctttcaggcaagtcactcgtgaccgattgcgtcgttacggggaacatctgtatgattcgggcttaaaaccgaatacggtatcaacgtatatgcgtatgcttcgcagtatctataaccgtggggtagagttgggtagtgcgccctatgtacatggtctgttccgtgatgtgtatacaggagtggatatccgtcagaaaagggctcttccggtgagtgaactccgacggcttctttacgaagatcccaagacggattgtttgcggcgcacacaatcgattgctgctttgatgtttcaattctgtgggatgtcttttgccgatttggctcatttggaaaagtcggctttagattgtaatgtgctccgatataatcgaattaaaaccagaactccaatgagtgtggaagttttggatacagctaaggaaatgatgaatcagcttcgcaattcccagtcatcgcgtccgggttgccccgattaccttttcagtatcctttccggtgataagaaacgtaaggatgaacgtgcttatcgtgaatatcagtctgcacttcgccggtttaataatcatttgaaaagtttggcgagggctttgcacctgacctctccggtaacttcttacacgattcgccattcttgggcaactactgccaagttccgtggagttccaattgaaatgatcagtgaatctttagggcataagtctataaagacgacacaaatttatctgaaggggtttgagttgaaagagcgtacagaggtaaatcgtaagaatttgcattacgtgaagacttgccctttaggtcgaatttgaatggttaaaaatttgataatcagcattgatgctggtgtgttacttcttaggtaacggatttaaatttgacgcaaagatagacaaaaacacatgtattaaacaaataaaaacctactttttttcgatttaaccctgaatttgaaaaaaaatgtatctgaacatgaaaaaggcctattttcatgcttaggaatttatatgcccaattttcctaagaatctctactttctctaaagccaagatgctctcaaccctcattagacggtacttttcgactttttcctcccgatttattatgaagtgtacttttccgttacctaagaagtaacggaaaaacatggggtaaaaaagtatgattttaacaaaagagaaatcactaaatgctgggcctatttatgggacaggggaaggcgtagcacactcaaaacgctggtatgttgcattagttcgtatgcatcatgaaaagaaggtttccgagtatttgaacaaggtggggattgagaattttgtacctgttcagaaggaaatccatcaatggagtgatcgccgtaaattagttgaatccgttcttcttccgatgatggtttttgtacacgctgatccgaaagaacgtatggaagtcctgaattttactactgtgagccgctatatggtgatgcgcggtgagagcagtcctgctgttattcctgacgaccagatggcacgttttcgtttcatgcttgattattcggatgaaacaatctgtatgaatagctctcctttggcacgtggtgagaaagttcaagtaattaaaggacctctgcaggggcttgtgggtgagcttgtcaatgtagatggtaaaagtaagattgctgttcgactgaacatgcttggttgcgcctgcgtagacatgccgattggctatgttgagcctataggtgaaaaaaactaagtgggtaatgacgacttcctgtttacaagaaaaaatcgataaacttcaaaatacagttcatgctctgctccataaaagtaattatatggcgggtgtgtatgttgatgatcttgcacgactgaacaacgaaattcatgaacagatcaatgatctgtatccttgtcacggtaagactgttgagcaggaagctgctttgtgtctgtctcttctgatgggatatagtgtgtctatgtatgccaattcggaggatgaggcaaagaagaagactgttctgaggcgttcgcaaatgattctgaaaaaccaattgccttcaccattgaaaattcagttacacacaatctacgataaactattgtcatagtaaatctactttttggaaaaagactttataatttattggggtatttaaattatgaaacacgcatttgaccgttttgttcaatatttgcagaaaaattattttagttattggattgtattaggaattgatacattcatagctttgatttgtacctgggtgtcatttatcggcattcattatataacggagacttctaaagaaatcacttctctcttccatattttggcgatttctgtgatctccagtgtcttaggttcctttttattccatacctaccgtaatacgatccgtttttcccagttgaaggaattatggagaattgccggaagtgcactgataaaagctgtctgtattgcaatggctatctggcttttcctgcctcagacgggactgcataatagtcagaaaatagtctttgtactgtttgatggaatgctgacttttattgccatggtaggctttcgcattcagttgattctggtgtatgaactcctgttgaatatgctgaataagaagaatatgcatattctgatctatggcattgatgataagagtgtggcattgaaagtccggttaatgaacagctctcactataaggtagtaggcttctgtatctacggaacaggcgactccatccgacgtgtggctgatcttcccgtttattcatttaaagatgaagaatgctttaataaacttattcataagaagtgtatcggcggcatcctgtttgcccgttacgagaatacccgtgaagaggaagaccgcctgcttcagtattgtaaaaggagtggattgaaaacgttgattgctccgagtatcagtgaggctgacgaaaacggaagtttccaccaatgggtacgccctatcaagattgaagacttgctgggtcgttcagaaattcatatcaatatggaggaggtgatgactgagttttgtggcaaggttgtgttggtgaccggagctgccggtagtattggtagcgaactttgccggcaactggctcagatgagcatcaagaagctgatcatgtttgattccgctgagtcacctttgcataatgtccgtctggaatttgagaagaattatcccgatcttgattttgttcctgtcattggagatgtccgcgtgaaagaacgtctccgtatggtattcgaaacttatcagcctcagataatctttcatgccgctgcctataagcatgttccattaatggaagagaatccctgtgaagctgtgctggtcaacgttgtcggctctcgtcaggttgctgatatggcagttgaatatggagctgagaagatgatcatggtttctaccgataaggcggtgaatcctaccaatgtcatgggatgctcgaaacgcttggccgaaatctatgtacagagtctgggatgtgctatccgtgagggaaaagtaaaaggccataccaaatttatcactacccgctttggtaacgtcttgggtagtaacggttctgtaattccccgttttaaggaacagattgagaatggcggtcctgtcacagtgactcaccccgatatcattcgtttctttatgactatccccgaagcttgtcgtctggtaatggaggctgccactatgggtgaaggcaatgagatttttgtctttgagatgggaaaggctgtgaagattgttgatctggctacccgtatgatcgaattggccggttatcgtccgggtgaggatattgagatagagtttacgggacttcgtccgggtgagaagctttatgaagaagtcctgagtgataaagagaacacaatccctactgagaataagaagataatgatagcgaaggtacgtcattatgaatatactgatatccttgaaacttatggagagttcgagaatttatcccgtacggtaaagatcatggacacagtgaagctaatgaagagagtggtaccagagtttaaatcaaaaaactcaccgaggtttgaagtcttggatagataattataacactaaataaatcaacaatggatacaaaagattttaagattgctgttgcaggtaccggctatgttggtcctagtatagcaacgctttgggcgcagcatcactgggtgacggcagtcgatgtgccctggttccacacatatgaataaaaatagaagggtgaccactcatcagatcattctgaattccatattcttctcaatacgactatgacaataacagcattagatttgtgcaaggggcatccacagtttgtagtatcattgactaatcgtgactacgttaggattgctaacaggatattcctactcgtttggatcttgcaggtacatggatagaccaaccatatattagtcagtatcacccaggatgggcgctaactacattctttgaaccaacttttgaggttcgtgaccgctgtgtactctctacctctacacgcaagatgattcaaaagatatggccggtgaagttgccaatgatggacctaaagatgctcgcatgactcgtgttctgctttgagaacaattctgaacgtgaagacggacatacttctgggcacaggactctattggaatctgcatcccaggtttttattgtcattattacgacaagaactttgggcctcaaaagatagaatacactaatgatgagatggctctgcgcttccttgaagagcatttagttatgagacctatggatcctcgcaaaacgggttgctccgttgtcgaaggaaaagacattacaccagataaggtaaaagctcttgcaaaagcagcaagtgattgttgggatactattatcgctcatgatcttgataagttcgcaacatcttatatggctagtttcaatgcacagatagctatgttcccctggtatggtaacttctacttatgttggtcatccaaaacttgataatagctatatccaacaaactgtcgatacatatagctcgttggagaatgttcttgcttggaagatttctggagcaggaggtggtggttatctcgcgattgttgtcaaaggtgcacaacagttcatcaacgagcatcacgaagcatttgatatacatttcgcagacaataataacacattaattatatgttcaatttacagaaattcatcgctgattcagtgacttatcgtccagtcagcatgtttgctacagatattgaggcaaacaaggagactcttatcgctgagataaaagataagaaagtgtgcgtaattggaggtgccggttcaatcggttctagttttatcaaggcagttctccgtttcgaacccgcttcagttgttgttattgatctcaatgagaatggtttggctgaactcgttcgtgacgtacgttcaaccgaaggtctttacgtacccgatgagtttcgttgttacaccctcaactttgcagatcctattttcgagcgcattttccgtgaggaaaaaggcttcgatatcgttgccaacttctctgctcacaagcatgtacgttcagagaaagacaagtactctgttcaggcactcattgaaaataacgacatcaaggccaagaaactgatggatcttctttgtgtatatccgcctaagcatttcttctgtgtttccaccgataaggctgcaaatcctgtgaacataatgggtgctagcaagcgcatcatggaagacctcgtgatggcatataacttccacttcaaggtcactaccgcacgctttgccaatgttgctttctccaacggctcacttcctgacggttggatccatcgcttccagaagaagcaacctttggcagcaccttcagatgtaaaacgctactttgtcagtcctgaggagtcaggtcagatttgtatgctcgcttgtatcctcggtaatagtggcgaggtgttctttccaaagttgggcgaagaccagatgctcactttttcagctatctgcgatgacttcgtgaaggcagaaggcttcaccaaggtagagtgcaagaatgatcttgaggctaagcagtatgcagctcagatgtcgtatgagtctgacacttatcctgttgtttacttcaagagcgatactaccggtgaaaaggcatacgaggagttctatgtacttggtgagaaggttgatatggagcgcttcatgagtcttggtgtagtttgcgaaagtacccgtcgaccaatgaatgaggtgaacgctttctttggcgaactcgagggcattttccagaacgaagacttcaccaagacagacgttgtagaatccattaaaaagtttatccctaacttcgagcatgaggagaagggaaagaatcttgatcagaaaatgtaattcacggataattcgtgggtattttacgataatttgtgctttaaagaaacaagatcatggcagattttaaatccactatagactttatcaagtccgtttatggcaacaaggagttcactcctcttgctgttcctgtattcgcaggcaatgaaaaagcatatctcaacgagtgcattgacaccaccttcgtttcgtcggtaggtaagttcgtcgatcgctttgaggaagatatggctaaatatacaggcgcaaagcgtgccgtagtgtgcgtgagtggaaccaacgccctccacatgtcgctcctgctcacaggtgtgaagaaggacgatgaggtgctcactcaggctctcaccttcatcgccacttgtaacgccctttcatacattggtgcacatcctgtgttccttgatgttgataagagcactatgggcctttcgcctgatgctatgaaggagtggttgcaggcaaatgcagagattcgtaagaacactcgcatcgcagaactcccagagtcacaggacttcgctttccgtgaggacgagctcgcttgctacaacaagtacaccggttgtcgcatcaaggcttgcgtacctatgcacaccttcggtcatgttgttcgtatcgaggagattgcagctctttgtaaggagtggcacatcgaactcgttgaggatgcggctgagtctataggctcaacctacaagggtcagcacaccggtacctttggacgtattggagcaatttctttcaatggcaacaagaccatcaccactggtgggggcggtatgatgctcttcatggacgaagagctcggggcctacgcaaaacacatcaccactcaggccaagattcctcattgttgggagttccgtcacgaccacatcggtttcaactaccgtatgcctaatatcaatgcagcccttggttgcgctcagttggagaacctcgacaaatatgtagctagcaagcgcaaggtagctactgaatacatcgagcactttaagaacgtagatggcatcgacttcttcgcagaacctgagaataccttctctaactactggctatcagccgtggtgctcaaggataaggagtttcagctcgacttcctacagcagaccaacgacaatggtgtcatgacccgtcctatctgggagctcatgaaccgtttacctatgttcgagaactgccagaacgatggtctcaagaataccatctacttcgctgatcgtgtagtaaatatcccttctagcgtacgtcttgaagatctctaaaccaacatagtacatcccaccactatgaaaattgataagattgagcatatgggtattggcgtaaggagcatcgaggagtcgctggctttctacgaaggtgttttgggcttcaagtgctacaatcttgaagaggtagtcgaccagtaggtgcgtaccgcatttctgaaggttggcgatgtgaagatagaacagtttgaacccacatatccgaagactgcacgatagcaaagttcttggacaccaagggcccgggggcacttcatatcgcatacgccattgaaaaaggagtggtcaaggctttgtaacaatgcgaagaatctggcattcgtttaatcgataaaagtccccataagggtgccgaaggcctgcagatagctttcttacatccaaaaagttctggtggtgtattaactgaattgtgtgaatcataaattcttataatgaatatggaaaagcttgttttagtaggtggtggtccatttgcaaagtgcaccatcaattacatagaagacgaagagaagtacgagatcgtaggttataccgaccttgaagacaatggcgacatccttggctacaagtatctcggcaaggacgaggaagtgctgtctaagctctttgcagaaggtgtaaaatatgccgtagtaggagcaggcaatcacctcaacgactgcactatcaaagagaagatcactaacaaagttaagtcttacggtttcatccttcctgttatcaatggcaagtactctgtggttcagagaggtgctatcgttgaggaaggtgttatcctacgcaatggtgccatcattcaggcaggtgctgtggtaaaggcacatgctatgatcggtgatcgtgtgctcgtttgtcacgatactgtagttgacgagtacgtacacatcgtagccggttccaacatcggacgtgactgctacatcggcaaaggtacactcatcggcaatagcagtaccgtcctcaatggcgtacaaattactaataacgtgctcattggcgcaaagagtcttgtaaacagaaattgtacagaggcagggcgcacttatttcggtagtcctgctaaattagtagaaaagaaataatggataaggtgtatttgattggtgaggtaggtcctaaccacaatggtagtgtagaaactgcacttactatgattgaaaaaatggcagaagccggtgtcgattgcgttaagtttcagatgactgacccctatctgctctatagtgatgattctttcaaggcttcttatcagaagaagaatgacaaagcaaagggtgctcgcgaaatgtccctgagctaccagctcaagcgtgaggcacacatccctctattcgagaagtgtaaagagtgtggggtggattatgtatgttcggcattcgacctcgaaagtctgctctatctcgatgagcatttcgacatgccttactacaagattgcatcgggtgaaattttctctctcgatatgattgactacatcagtgagcggaataagcctatcattctctctactggtatggctacatacgaggaggttgagaaggcacttgcattgctcaatcgtcactcgcagaaggacattaccgttctgcattgcatctccaactatcctgccaagtacgaggaagtcaaccttcgcaatatgctcactcttggggagaagttcggttgcaaggtcggtttctcagatcataccgtaggcaacgagtgtgctattgcagctgcagccatgggtgctactatgattgagaagcacgtcacccttgataagaatgccaatggacccgaccacaaggcatctatcgacatccctgagctcacctctctgatatcggctgttcgtcacgttgagatggctttgggcagcttcgaacgtcagttcagcgagagccagcgtgagatcagccgtgtggcgcgcaagagccttatcaccaagcacccgatgaagactggtgacatcattaccaaagaggatttctgcttcaagcgtcccggtatcggattcttgcctatcgagcaggatcaggttatcggtcatcgcctgttggtagatattgaggcagatcgtgttattcgcaaggaattcatagactaagatgaaaataggatttttaacaggagcacgctctgaatatggtgttatgcgtcagctcatccagcgcgtctctgaggactctttctttactttggttatctatgccacaggtatgcactttcagcagaagtatggtctaaccatcaacgagctgaaagctgataactttgggctcatcgtagagatgccttgctataccgagaagcagcgagataagaaagatgatttcgtagcactcattgatgttatttctgcaggtctcatatctaatcgtcctgacattctctatctcattggcgaccgtctagaggcatacgcaggtgctttggctgctcatttcttgcgcatacctgtagcacactttgccggaggtcagatcaccaagggggctgttgacaatatctaccgctacaacatttccaatttctcatctgttcacttcgttaccaataagtatgcgtatgagcgacttcagcagatacctatcatagagaacgacaccattcatctcgtaggctcatcggctgtggataatatcgtcaactacctcaagaccccacgcgacttgaccgacctcgatcctcgtctcgaaagggactcgtttgctttgatgacttaccactctcagaccgtaggctcgttcgatattcccgctgctatggaactttctatccgcacgatcatcgagaaggacaagcgcatattgatcacttatccaaacaatgacgatggttcagaggttatcctcgatgttatcaaccgatggagcagtaacgagaatgtcattgtcattcctaatttgggagtaaagaactatcatgctgccatcgataattgtctcttcgttatcggtaactctagcagtggcgtgattgaggtgccttatttcgacaagttcaccgtcaatgtaggccagcgccagagtggacgcaatgctcccaagtcggttatcaatacagaatccgacatcgaacttctgcaatctactatctgtgatattattgatggcaagctatcggttcccgagcaagaatacatctatgggcgaggccaaagcattgccgagattattcgcgtcctcaaatccatcaaattctaaattattccgaagtattggtgtatggaaatcaatataaatgaggtactgtttgtcataccagcaagagggggtagtaagcgtttacctaagaagaacatcaaacctcttgcaggcaaaccacttatttgttatagtctggatattgctcgtcagctgactgatgatggtaacatctgcatatctaccgatagcgatgacatcatctctgtagtgagtgattgtggctatcatgtcccttttaagcgtcccgatgaactggcatccgatacagctactaccaacgatgtattggttcatgctgtcaattattacaagcaactgggtatggactacaagtatctggtgcttcttcaggtcacctcacctcttcgtcgtaaggaggacatcaccaatgtcctctccttgattgatgatacgtgcgacatggtagtgtctgttcgcaagtctcatgcagcatccgttatgtgccatgagaatgagaatggtttccttacacctacactcaagaagaactatggtcgttgtcaggacttcaagggtgaatacttcgagttcaatggctccatttatgccatgaaggttacatcgctactcgaaaaaggtatgggtgcttttaaacgcaagaagtatgtcatgcccgacctcctttccactgatattgataccgaggaggatttcattgaggcagaagccaaactttactatctacaacttacaaaacaactctaaggaatatgacttttgaatcccattgcataaacagcagccttaccatcaaggatgctcttattgctctcaacaatctgaggaatgcaacacttaccctcttcgtattaaacgacaacgcacaaatcattggaacgcttaccgatggtgatatccgtcgcgctttggtcaacggtcatggtcttgactgtacgctcgacaaggtgatgcatcgtgactacaagttcatccgtcaaaaggagtttaccgtagcaaacttgcgctcattccgcgatcgtcgcatcattttcatcccaattctcgatggcgagaatcatgtggtggatgtggtcaatctccagaagtttaagtcgaaacttcccatcgatgccgtcctgatggcaggtggcaagggagagcgccttcgtccgcttactgagaagacaccaaagcctcttctcgaagtaggaggtaagtgcatcattgaccataatgttgatcgcctcatttcctatggagtggagcacgtcaatgtaactgtcaactaccttggtgaacagatagaggaacattttgatactcctcgcgacggcgtacaggttcgcactttccgtgaaccaaagttcttgggtactatcggtagcatcaagtttgtagatatcttctacaacgataccatccttgtgatgaactccgacctcttcaccaacattgactatgaggatttcttcttgcatttccaaatacatgatgcagagatgtcggtagcagcagttccttacaacatcagcatcgaactcggtatcctcgatctcgatggccacaacattaagggacttatcgagaaacccaagtataactactatgccaatgcaggcatctacttgatcaagaaacgcgctcttgctgagattccagaagatactttcttccatgccactcaccttgtagagaagctcattgcccagggtaagaaagtcatccgctatcctctcaatggcacatggatagacattggcacgtaccaggagtatgagagagcaaaggaattagtgaaacatttgaagtaatgagcaatggaaaatagaatattcaagaaattaattcactcttcctatatgcaaggattgaggcagtattggtggaatctgtttgttaatggatttctgatgtcttatcttgttccagttggttttcgtcgcttcatactcaacttcatgggtgcgaagatcaagggagcattacatggacatagcgctatactgacaaccaaactacaattggcagaaggtagtttcatcaaccgcaattgttttattgacaataatgcgatgataaccatcggaaggaactgttctgtcggatataaagtaacattcataactgccaatcattcaatggaatactgtgataaacggggaggtgaaaaccagccctcaccgattgatattcatgatggctgttggataggagccaatagtactatacttcctgggactatcatcgagaaaggatgcgtgattgctgctggaagtgtggtaaaaggaacatgtaagacgaatagattatacgctggagtgccagcaaaggaaataagacaattagactaatgtttggattattatcaaaaaataaggaaggtatcttcaatgtcgggttattagaaatggcaattgcgctatatcctatcattgcaggatatggctatggttcttttaaattggcttttggctttcttttgattattgatgtttgtttgattggacgtatgaggcaatcaaacgtgtcgttcagacagttataccaatacttagcctttgttgtattgcacaatacagtgtggctgtttttgctacagtcggtacctagttattttgtgaattcatgcatagctgatgttatttatcttgtttcaatagtactgatagtcccacacttggactttgttaagctcaagaattctatctacatagtggctgtcgtttgtatagttggtatgatttaccatgtgctgatgatacagactggtcattccattcagcctattaagttgccgtttatgcctgaaatgggatcacagtctcgactttatgcctatttggatcgtcctacctctttcttttgggaacctcagtcatatgcttctttcatgttggtgcctcttttcttcctgcttagggagagacaaatgctttttgctttccttgtggctgcttccatgcttgtttccacctctactacaggtatcttgatggcaatgttcatgcttgctttcttcctactgacgcaaaagcagaagatatggtatcgggttcttggtgtggcggcaatcataggtctggtgtatttcttcttatattcatcattcacatcatcaggactagaaaaattagagaatactaatctggaagaaaataacagaaccattaatggtcttttgattgctcaagatatgaatttctttgatctcatttttggagtaccatttgccaacttgcaggatgcttacgaagctgggtacattactcgaaatattattgtaatggctgatggtatcgtgtttgtttccgctttctgggtgtgcttgtgttgtcaaggtttgataggattgttcttcttcatgaacgtctattggggaatatttaagcagaataaggcagtatcaccatacttgatttgtataataatcagccttttctccaatccggatattttgggtgcatcatacgtttttcagcttatgataatgtatgttttcatatcctacaatcagaagcacgacgaacaattagaatacagtaacagttatgaaaattaatatccttacatttcagtttgctaaaaactatggtgcaattttgcaggcgcacgcattatcttcatatataaagaatgatctccatgaagagtgtgagattattcagtattggccagagagaagtgacgcctcatggaatatgtattatcgaggatttgaaccgaaagtaattctacgcaatatctttgtttttttcaatatcaagtttaagcgagaatttagggcaaagaatcaggtcatgcagaaagctatatcagaacttctgcctcttactaaagaaagatatactcgtgaatcaatcctaaagcacccccctactgccaatgcctacatttgcggaagtgaccaagtttggaactttgtcaagtgctttgacgatcctacatacttcttcgattttacaaagtcaatgaagaatgtcaagcgaattggttatgcaccaagcattgccgacccatggccaaagtcaaggtgggaggaattcaaggggtatctttctcatatggatatcatctctgttcgtgaaaagagcgatgtgccagtggttgagaaactctcaggcaagccggttacgcacgtcgtagatcctgtattcttgaagacaagagagtattgggacaacctctcgcaggacatgaacatcaaggaacactatatcttctgctatttccttggtacaaatgatttggctgttaatctggttaacaaggtgaagcaacttaccggcttcaagattgtccacttgaatctgaacgctcgcgatcgttttaattcggattacaacctgcgtgctgtctctcctcagcagtttatcggtctcatcaagaatgcttcatacgtttgtaccaactcattccattgctctgcattctctatcatcttccgcaagaactactttgtagctcccaagggttttgccaatgcccgtatggagagcctgcaggagatgttcggtctgaacaatcgcatgtttacgcaagagctgatcgatggcatgaccattgaacagatgactgtagattattctaaggctgacgaaaagttcgctccatttaaggagaagtctttacaatacctcaacaacgcactttatggagaaccaaattaaactggtggagaaaacgcattgcacaggttgtcgagcttgttccaatgcttgccccacatcgagcattaagtttgagttgaacgggttgcactattaccctacgatagatgaggacacctgcatccgttgcggcaagtgcatgagtgtatgctcgcctcttcaatgggatataaagcatccttccggtatagaagtaaagtccaagtattactgtgcctggaataaagatgcagcagaacgatatgctgccacttcgggaggcgttggtggtgctatggctgaactggcgttgagaaacgggtggtatgtgtgtggagctgctttcgataaggattggcatctatctcacatcgtatcaaacgataaatccattatagagcagattaggggctctaaatatctacagagtaatatggatggggtatatgcaaagattaaagtactcttggacgaaggtgagaagatgctgtttattggtactccttgccaggccgatgctttgaacaattgcgttcctgtgaggctgcgagagaatctgcttctttgtgagattatctgccatggtgtcaattcacccaaggtttgggaagattacagacatcacttggagaactaccacaagtctccaatagccatctataattttcgctccaagagttatggatggggtaagctgcgagtagcctatacattggcaaatggcaaggaggtggatgttcctgcttaccaaaacatattccaccattggtttggacagcacttcatgcttcgcgagtcttgcctcaggtgtcagtacagaactgtcaatcgctattcggacattatcattggcgacttctggggtattgaaaacatcgaaccaacgcttgacgtgaaggccggagcttcggttgttatcatcaattcgccagccggcgagtcgttctttgcagactgtcagataaccaagaaggagatagatgcctcttctgccttgaaggtcatcaaggggggggtagataagactaccgaagaacgtaaagtgatggaaatagagcggatgcataagtttgaagcggactatgctactcacacgtttgatataatgtacaaagatctctatccacatattaccctaatgcaaaaattgttgaactccgtattataccacctgcatttaaagaaatgagtaaaaagaatattgcaaaatccgcgataggtgtaaccttcgtgatgatcataggttacctcctttcgttcggaaaggaagcggtagttgcttactactttggggtatcgcccgaagtagatgcctataccattgctatacaggttcctgttattcttttctcgtttgtggctgtagccatccagtcggtggtagtgcctatttattcagatatactttacaatcagagtcgagacaatgccaatcagtttgccagcaatctgatcatcatcgtcacattgtttgtcttgttgctcttccttttgggcgagacattcgcgagtggactgatttacctatttgctcctggtttcagttcagaggtgcatgaccttgcaactacattgttgagaataactcttcctacagtgttcttttcgttggttatcaaggtctatacagccattttaaatgtcaataaaaaatgtgtatttcctgagttgggattgctgcttcttaatattggattgattgtcaccattgtggtgcttcaagcccaatacggtattgtggctgcgtgttttggtcagattgtcggtactttggctcagtttgttttcttagcattgctgattaggaagtactttactttctcgttttgttttaatccgaaggaagagaaaatgaagcaagccttgaagatgtccttacctgtgttttggagtatcagtgtggctgaattgaacgcaatgatcaatcgtatggttgcctcattcctattcgtaggatcaattgctgcactcagttatgctcagaagttgaacaccatctttatatccttcttcacgtcggctattgctaccatcgtatatcccctctatgcggaatcggcagccaagggcgatatgcaacaactcaatagtcgcattaacctgacgatgtcggtttatgcatttttccttgtgccggtgatggcattcctgttatgtttcaagcgtgaggttgttacgttggcatttgcacgaggggcctttgatgcttctgccatcgatttgactcagcaactcttaggtttctatgtgctcggattgctattcctatcgttgcgaggtacggtcacgaatgtgttttattcgctgaaagacagtaccacgccggccaagaacgcaactgtcggtgttcttatcaaccttgtgctgaaccttacgttaccgtttgttatgggaatcaatggtcttgctctggctacagcactctctgccatctacattacgactatgttggtcatcttactgctgaagaaacatcaggagttccacctcaaaggattctttaagaacttcaaagggattgtcatcgcatcgttcattaccgcgctggtgatgttgacaaataaatacttgatgggagattattcgatactattacaattcagcttaggtagtttgtgctgtataataacctacttgttttgtgtgttggtaatgcgcattccgatattcatgatgtttgcagatatgattaagagaaagaagaaataaaaaacgacagatcatgaaaatattatcttttggctatattccttctaatttcggaggtcggcaaagtagcggtttggcgaatgtcatctatcagttagcttatcatgtggcaaaactgaatggggtggaaatgattttggctgctactgatgtgtttgtgcctgagttgcataaggatgggttaactatcttaggctggacgaaggggatgctgataaaacacgctctgatgcatcctgttgtaggggcaaagatattagtcaacacattttgttgcaaaactaagtattctccattggtatccatacttgggattttcttcaagagtttgctacttgattatgctatacggaaggtgcagccacaagtgctgcatcttcatggagcaatttcgcctttttacttacctcttattccaaataatgtaaaggtgattgttacactccatggcaacgtaggcgatgacgccaacatcgtcaactatcagacttatgctaagttggaaaaagacttgatgaaatctaatagagttgataagctttgcctcatagcgtccatgttggaaaacatttttataactgagtatggtgaaattgtgccccctgtaaagataatactcaatgcctacgatgataaggtattctacctgacagaaaagaataataaaaaactcaccctttgtactattgcttcttattccgaccgtaaaggtcaagagcgcgtcattgaggccatgaagaatagcggatgcgattatcgctatttgtgcatcggtcatatctctgaggagaacaagaagatgctcgaagagaaagcaaaaggattggactttgagtggctgggtgtgaagaaaccgactgaaattcgtaaaatacttgctgaatgtgattatatgattctgccaagctcatcagagggctttggtctagtctatctcgaagccatcgcatgtggcgtgccggttatcattcctcagcacttgcccttggctcaggagggttatatccttaacgagagtaattccattagtatagcagacagtagctcaaaggctattgaggctgtattgccttcactacaggaaagtaaatgggacagaaaaacagtttcagagtctatcatctcctatacttgggacaatatcgctaaagaatatgaagcacaatttgcatcactaataaaaaaatgaaacaatggattttagaagtttatatcgtctcaatttgctgtttatcaacgcgggtggtaaagtaaaatatctactccgcctttcttcattgagtaagaccaagaaattactaaagacaaacgagaagattattgcgacccgtaagcacgacaccatctacatctgtggacttggtccttcgctggcagatgtggatttggataggttgatagacaaagataccgataccttggtcgtgaaccattttttcaagatggctgagaagacaaaattgagaccaacctactatctgatggctgatgccggattcatgaaaccaaagcatattgaggctttcaacaaggctgttgaaatgtataagaaagataccacttttgtctggaacacctcctttctgaacatcaatcccgatttgatcaacttggactgtaaaaagactttccttgcgatgtacaatggctactacatcgatcctaagaaattcgagcttactaaggtcataccggcttttggtaatgtcgtttgtgctgctattgcatttgccataggtgcaggatataagaagatagtccttctgggatgtgatttcaattcttttgccttccctcatgaggttcattgctatgatggcggtaaggaaaacaaggctgtacgaagaatatctcttggttatgagctcttctgctattgcttcgatgcatctgtccatgtgcagttggcagaatatgctagaacattgggcgttgagatcatcaattctactaaaggatcgctaattgatgcgtatcctatgaatgttgatgaaactttatatagaactggtgttgataagtaatgggagctttaaaatacattaaaggtgggctaagaaatctcttgaattcaggagtgtcatttctatcgcgtattgatgatgtttcagaggttagtccaaaagcaaaggtatatggcaagacacagatttatcagtcacaaattgatgactactcgtatgtggcaagtggaacgcaagtgatttgtactaaaattggcaaattttgttctattgctgatgatgtaattcttggtcctggaatacatactcttagtcaaatatcttcctctccaattttcacagaatactataatgcggttggtaagagttggacttccaaaactgtagtaaagcccttcaaacctgtgtgtataggacacgatgtgtggattggcagcagagtggttgttatgggaggtgtaactatcggaaatggtgcagtcgtaggagcatgtgccgtagtcactaaggatgttcctccgtacgccattgtaggtggcgttcctgcaaaagtcattcgctatcgtttccctgaagacgttatctcaaaactagaggaaatccaatggtgggatatgccagaggagaaacttaagtcatacatcgcattattccaaaaagaaaatataaggattgaggatctagaagaactttgttgctaatatgaaacctgcccgaacaagtgaagtgtaagctcatggtgcaattccaacggacggaaaaaagaatgaaatcaaattatgagtgaattgcaaatatcacaacgagggtatcaaatgccacaatcgccaatccgtaagttggctcttttggcgtatgcggctgaggatgagagcgtgaagatttaccgactgaatatcggtcagccggatctgcctactccgcagaaggcgatggatgtgctaaagaatgtggatcgtaccaccctagagtactcaccttcgcaaggttataggtcgcttcgtgagacgctggtaaactactacgagcgctaccaaattaagttgaatgcggatgagattatagttccagagcctgcatatgcgaactacatgagcttcgctatttcggcgggtgcggattcgtacggtggcaactaccattgaggaaggattctgcttgtctcatgtagataagtttgagaaactgatcaacgagcgcacaaaggcgattctgatttgcactccaaacaatcttacaggctacctctatacgcagaaggagatgaggtgtatcgcgagttcatctatactggatcgccttacatttcggcaatgcaattggagggtatcgagcagcatgtggtgctgattgattcggtgtcgaagcgttactcagagtgcggcattcgtattggtgctctcatcacgaagaacgaactggtgagtaagaccgtcatgaagttctgtcagacgcgactgagtcctccattgttggggcagctagtggcagaggcttccatctcgaaggaacggagcagtatcgcgcgaggtgtacgacgagtatgtgaaacgtcggaaatgtatgattgatggtgtgaatcgtacccccagttgctataccctcggtgcctatgggcgcgttctacaaggtggcaaaactgccagtggttggcgagacgattatgcaggcttctgctgctggattctatacttcgcctgatttgggaaaagatcaagtgagactagcgtatgtgctttgtaaagaagatttatagaggacacttatgatattgcagaaagttttagatgaatatgatatattgaataacaaataattgatatgtacgtacatttctttaagagagtcatagattttctggttgcgttgtgtgcgcttcctttcttttgtgtaatttacattgtattagctcctttctatttctttatggatagaggcccgatgttctattctggaaagcgtctgggacagtatggcaagccattccctatgcataagttccgctcaatgaaggtgaatgcaccagatattcgtctgaaggatggttcaacttacaatggtgatgatgatccacgtgtaacaaagcttggccgttttattcgcaagacgagtttagatgagatacctcagattttaaacgtgctgaagggtgacatgagtctgattggtcctcgtcctgatccgttagattggctggacaagtataaagaggaagagaaggtcttcctgaatgtgcatcccggaatcactggctataatcaggcatactatcgtaatagttccgatgcacaggagaagattgacaatgacgtgtattacgcaaagaacatcagtttcgcccttgatgtgaagataattttgaaaaccatcaagacagtgttgttccgcgagaatgttaatgtaacaagagaataattactatgcgagaatacggaagtgagcatcctgccattgtgctcccagatggctattttgagtcgatggaggaatatggtcgtgaggtgttgttcatgagaagtggtcgtgaagctttgctgttggcagcaatagctgcttctacagaaaaagacaaaacgatactctttcctgcctactgctgttggtcaatgagtgcgccttttgagaaggcgggctggaaggtgatttattaccgcctgaaggaagatctgactgtcgatattgactatctgagacaactgttagaaaaggagaagccacaggcaatactgacaatgaacttctatggtagtgcttcgacagacgatgctgtacgtatgattaaggattgcgatgaagacataaaggtcattgaggacttcagtcattgtaccttttcgcttaagttgatacacaatccaaagattaatatatacgtgtcgagcatacgaaaatcgataggtgtgtgtgatggggctgtgatattaagcaaagagccgctacctacccagtacatacaagaggaacaaaaggattttgctgacaagcgctttgtagctcagacggataaggcacgctatacctacagtaaaaatcaagagaagaaaggtgaattcctcagtacaatacgcgagtgtgaagggatcatcaacgagtttacgtctgttcgccctatctcagatcgtgcaagaaagcagttggctcaagtgaatggtgaggagattgcctatgctcgtaggaagaatatgcgccacttgtggtcattgctgaatggcaaggtggagatggttccgggattggaacgatgcatggagggggctccattctcattgcctatccttatagataatcgcgatgaggtgcaaagtaccttggctaaaagaggtatctatacgcagttgttgtggcctatttgcgaggaggctcagcaggtgtgtagcgtgtcgaagatgatggatgctcgaatactgagtgtacctattgaccaacgatattcatgggatgacattgaggatatggcaggcatcatctgtaatgtgctcaatgtttaggactaaataatataagaatattatgcaaaaaagactattggtattggccgcaggcatcttgcaagtgcctgtcatcaagaaggccaaggatatgggaatatatgtaattgctgccgatggcgatgcgaatgccgtaggtttgcaatatgcagataaagctgtggtggtgaacatcaccagtgaggaggatgtgcttcgtgtagcacgtgaggaacgtattgatggtgtgattcatccttgctcggaggtgagcatgaatgtgatgggtcgtctcaatgaggagttagggttgtcgggcatcaccaagctacaggcgattcgtgcgacgaacaagcatctaatgcgtgaggcatttgagaggggcaatgccccttcgccgaagtctttctgttttgaggatgcaaataaagcttggaagtgtttctgtaaggaattgcctaaggatggtattcttaagccctctcgaaatagtggttcacgtgggattgcaaagatacagaaaggactctctgaggttcagtttgttgaattattcaatcgtgctagagagaaatcacgtgataagagtgttatgcttgagcagtttgttgagggacctgagttctctgtggaaatcattgcttggaatggtgaagtaaatgtgctgacagtaacagataagaagacaacagaggctccctattttgtggagttgggtcataatcagccttcttgtttccctcaatatactgtggattcaattaaggacgctgcagtagctggtgtgaaagctttgggcgtgatgaactgtgcatgccatgcagaggtaaaagttcagaacggtgaggcttatatcatggagattggagctcgccttggtggtgatttcatttctactgaattgacccatttgagtacgggtgtagatatggtggctgctgctatcaattgcgcactcggtatagcgccatgtcttgagccttcagaggagaaacatggagtctgcatccgctatttctgcccgaagcctggaaaattggtaagtatacagaacgccgaggtgctggatgattctcgtgtgtatctctgggagatttaccacaaggagggcgatatgattccagaggtgacgagcagtctatgcagaagcggtcacgtgattgtgaccgaagagactccccaaaaagccattgcgttggcggagagattgattaacgaagtaaagatggagacagtatgaaagcagtattcccctgttcatattacttgcctgagacggcagcaagcctctacttgacggacaacatcgttcatgcttgtgccgagcaggacttagaggtggatctatacacgcctacccctacgcgagctgtgccagagggtgcaaaatggaagcgatatgaaacagatgtggatggcaagttgcgcatccaccggttccatttgtatggcgagggtaaaaatcctattttgagagcattgcgctatgtgataggtgaggcgatgttacttcactactgtatatggaagaaatatgatgttgcgtttatcgattcgactccaccaatacaaggattaaagatgccactgattaagtggctgaagcgaaagccaacggtatataatgctcaggatatttttcctgactccctagtgaacaacggactgtcgaaggggggggggcttgtatggaaaattggtcgtatcgtggagaagattacctacaaatatgcagataagattatcgtaatttctgaggacttcaagaaaaatcttttgacgaagggtgttcctgaggagaagattgttgtggtgtataattgggtggatcagaatgcagtggtagatattccgagggagaagaacaaactgttcgagatgtatggattagacaggagtaaattctatgtcacatataacggcaacattgggttgtctcagaacatggatatgctgctaagtgtggctgaggagttaaaaacatccaattctgacatccactttgttcttgtgggtacgggggtttatttggacgaggtgaagagaatggtggctgagagaaatatagataatgtacatatacttccattccaaccatatgaggatattagtcatgtattctcgttgggtgatgcgtctctcgtgatttctaagcccggaacaggttcggcatctgtaccttcaaagacatggagcatcatgtcggcaagtcgtcctgtactggccaatttcgatgagaatgaactcaagagcatccttgaagataatagctgtggcatcttcactaaggcgggcgataaagaggagtttaagaagtcgatacttacactgtatctcaatcgcgaactctgtaaagagtacggcaagaacggtcgtcagttcgtattgaataatctcactcgcgaggtgggtacacagaagtatgtggatgtgataaagtctgtagtgaaagactaatgaatgaattatttttcgagttactccagttgctataggtacgcgcgatgtattgtcgcatgttccttcggcaatggaatggcaggagataaatgagctttcggaaaagcaagggctaacaggtatttcgtttcatggtaggcaaaggctgtataaggaatactctgagcaaactgtctatttgctcatcggcctgaaaatgcagtggcttggaatggaagcatacattcaggaagaaaacttgttggtggatgagcgttgtgaggagactactcgtatgctagcggaggatagttttaggagttgtattctgaaggagcaagctaatgcctgctattatccacagcccaagttacgtacttcaggaaatattgatatatggggcaggcccattgcctcgaagggtttgtttgaagatagaaagctagtgactaagtatttgataaacagggaggatgactatatccgtatgcagtaccatcacattgactatcatatattccccgatgtggaagtgtatttctgccctatagtgctgttcaactatcgtaagaatgagcgtttgcaaaacaagttcggaagcggaatggatggaaataagaatagaaacaaatttgatcaataacttaaaaaacaaataacaaatgagtataaatttgagaagaaggaatattcctttttcgcctccagatatgacggaagctgaagctaatgaagttcgtgatgcaatcctgagtggttggattacgactggtcctcgtactaagaaactggagaagataatttctgaatacgttcacacagataagacggtatgtctgaactctgctacggctgccatggagatggtgttgcgtgtgttgggtgtggggcctggcgatgagattatcatgcctgcatacacttatacagcatcagcttcggttgttcagcatgtaggtgctaccatcgtgatggtagactcgcagaaggacaatgttgagatggactacgagacgttggctgcagctatcacggaacgcactaaggtgattgttcctgttgacttggctggtatttgtgcagatgtggataagatcaaggagattgtgactcgtcctgagattttggcaaaattcactcctaagaatgatatacagaaattgattggtcgcatcgtggtgtctaacgattgtgcgcactcgtttggcgcttctcgccacggcaagatggcaggtgagattgcggacttctcttcattctcattccatgcggtgaagaacttcacgacagcagagggtggcgcaatgacttggaacttggctttcggtagtgagaaggtagagcgtcagcagatgtattgcggaagtcttgtgccgtttatcgaggatgaaagctggaatgagttcatttaccgcctctcacaactcttctctctccatggtcagaacaaggatgcattggctaagactaagttaggtgcatgggagtacgacattatcggcccatggtacaagtgcaacatgacagacataatggctgctatgggtttggtacagttcgaacgctattctgagatgctgaagaagcgtgaagagtatgtggcctatatgaataaggctattgatgatcttaacgctaaccttgacactagccatcaggtagcttatctgaaccataaggctgaggatcattgctcatcgcatcacttgtatctggtgcgtctgcaaggtcgcacccgtgaagaggctaaccatgtaattgggcagatggcagagcgaggcattgctactaatgtacattacaagccacttcctatgatgactgcatacatggctctcggcttcgacatcaagtactatcctaatgcctataacttgttcgagaatgagatcaccctcccgctcaacacttgcatgaccatggaggatgtcgagtatgtgatggagaatttcgtggatatcgtcaaatcgttgtaagctattggcattgtgcccaatttcaaaaaacttatggaaggtatttgcaaaattaacatataccttttctggtctcaaaagacagataagtctcgttacgatgattgtacaactgcaagaaaaaacggataactatgatacacatagataagaaactaatatcagaactgtttgacagggctttggtaaaccctcgccttcgtcatagttttgatctttgtaatccagataatagtgggcagcgtatgctcaatgttcccactcgaagatgtgagcaagttatgaaagagctttgatagaataatttaaccccttaattgatactttattatgattacagaagaattgaaaaaacgagtagctgactttgttgaaatggagtagcgttcgggttcaatgcagttaataacatcaggattacgtcgctcgctgcatgcggattgccgaggaagataccgctgaaactttcgaagcattgaagaagtaatgtttatctgtcagcacaagtagggctaagagagagatttggtggtaatcggatatgtcggttgttcaactctcaaaaatagatggagatgactttgacggaatggcaccggatgatatgttccaacgcttttttgagcatatcttggatgatgacctgctgacactgccggttactttgatgacgatgatcctgacgctctagatgataacctaaagctttctcaaacgacaaaatattcaatgatctctgattctggtgaaggttgtccgcgaccttcattgcaattcttaagttaaagtgtttagggcttctataaattcatcaagaaggaagatatgttcttgaagcgttctgaggagagttatagtaatgttcgctttaatggtgagaaggttgactttgactcttttgaatgggactatttgctgtattagctaggaaaaatgggggtatggctgattaaatatgtatatactataaatgaaatattaatgaataaaatgaaaaagatagctttaatatcaggaatcaccggtcaggatggttcatttttagccgagtttttaatagaaaaaggatatgaagtccatggtatccttcgtcgttcctcttctttcaacaccgcacgtatcgaacatctctatttagatgaatgggtacgtgacatgaaaaaggagcgtttggttaatcttcattatggagatatgacggattccagttccttgatccgtataatccagcaggtacaaccggatgaaatttataacctggccgcacaaagccatgtgaaagtttcttttgatgtaccggagtatacagccgaagcggatgctatcggcacacttcgcatgctggaagctgtccgcatccttggaatggagaagaagacaaggatttatcaggcttccacttctgaactattcggtttggtccaggaagttccacagaaggaaactactccattctatccccgttccccgtatggagtagccaaacaatacggtttttggataaccaagaactatcgtgaaagctatggcatgtatgctgtaaacggaatcctttttaatcatgaaagtgaacgtagaggagagacttttgtaacccgtaagataacattggctgctgcccgtattgcgcaaggtcttcaggacaaactttatttgggaaacttgaactcacttcgtgactggggatacgctaaggactatgttgagtgtatgtggctgatccttcagcatgatactcctgaagattttgtaattgctacgggagaataccacactgtacgtgaatttacgacactggctttcaaagaagtcggtattgaacttcgttgggatggtgaaggtgtgaatgagaaaggcattgatgtatcgacgggagaggttttggttgaagtcgatcctaaatatttccgtcctgctgaagttgagcagttactgggtgatcctagtaaagctcgtacgttacttggctggaatcctaccaagacttctttccccgaactggtaaaaatcatggtatcgcatgatatgaagtttgtgaagaagcttcacatgaaagaactgatgaatagagaagaataagaatggataagaatacgaaaatttatgtagcaggacaccatggtttggtgggttccgctatctggaataatttgcagcgtcgtggttacacgaatcttgtaggacgctctcataaagaactggaccttcttgatggcgtagccgtaaaacaattctttgatgaagaacagcctgatgcagttgtccttgccgctgcgcacgtcggtggtatccttgcaaacttgcagtatcgtgccgattttatctatcagaatctccagattcagcagaatgtgataggggagagcttccgtcataacgtacagaaactgcttttcctgggtagtacctgtatttatccccgtgatgccgcacaaccaatgaaggaagacgttttgttgacttctcctttggaatatacgaacgaaccttatgccattgccaagattgctggtttgaagatgtgtgaaagcttcaatcttcagtatggcacgaactatatcgctgtgatgcctaccaacctttatggtccgaatgataatttccatttggagaacagtcatgttcttcctgccatgattcgcaagattcatctggctaaatgtttaaacgaagatgactggaaggccgttcgtagagaccttgacttgcgtcctgtggaaggtgtgaccggtagtgagtctgatgctggaatattggataaattggcaaaatttggtattactcctgaatcggtaactctttggggtaccggaacacctatgcgtgaattcttatggagtgaagagatggctgatgcgagcgttcatgtactgttgaacgttgatttcaaagatacttatgttacaggcagtagagacattcgtaactgccatatcaatgttggtacaggtaaggaagttagtatccgtgaagttgccgaaataattatgaaggaaattggctttaaaggtatccttctttgggatagttcaaagcctgatggtacaatgcgtaaattaacagatgtatcgaagttacacagtttaggctggcatcataaggttgagattgatgaaggaatcgagcgtctttataaatggtatttgaaaggtgtctaaattttataatttatatattatggaaaaaataaacggaaggaatgttttaatactgttgttgatcctgcttcttacagcttgtcagtcttataaaaaggtgccttacttgcaggatgcagaagtcgttttgtatagtacgcagaacgaacagttatatgatgcaaagatcatgcccaaagacttgttgactattgtagtgtcgtgtaccagtcctgaactggctgcgccttttaatctgacagtggctacgcagagtaatgctgctttgaattatacgactactcagccagtcctacaacaatatctagtggataatgacggtaatataaatttccctgtattaggtgagcttcatgtaggcggattgaccaagaaggcgaccgaacaaatgattgtggaaaagttgaaaccttatattacggaaactcctattgtaacggtacgtatggtaaattataagatttccgtgattggtgaagttgcccgtcccggtacattcacgatttccaatgaaaaggtgaacatcttggaagctttggctatggcaggtgatatgaccgtatatggtctgcgtgatgatgttaagctgatacgggagaatgccaatggcaaacaggaaattattcctttggatctgaataaagcggagactatcctttctccttattattatttgcaacagaatgatattatttacgtaactccgaataaggcaaaagctcgaaattcggatatcggaactagtacaagtttgtggttctctgctacttcgatccttgtttctattgccagtttattgtttaacatcttgaaataaaaagaaagagttatgaaggaagaaaataaaaacgggaaaggacctgaaatgactgaggatcagattgatttccgggcgcttctttttaaatatatcattcactggccctggtttgtaggtgcggtgttgctatgttttgttggcgcgtggttttatttgcattgggctacccccatttataatatttccgctacagttctgataaaagacgagaagaagggtggaggtgcaggactttcttcggaattggaggatatgggtttaagcggcctgatgacttcctctaaaaatattgataatgagttggaggttctgcgttcgaaaaccctggtaaaagaggtggttaatcagttgggactgtatataacttataaagatgaggatgaatttcctgctaaaggtctatataagacatctccggtgcaggtaagcttgacacctcaagaggctgaaaaattgaatgcaccgatgatggtggaaatgactttacagcctgaaggtagtatggatgtgaatgtgactgtgggtgagaagggttatcagaaacattttgaaaagctgcctgctatttttccgactgatgaaggtacattggctttctttcaggaagttgattcggtaactttacagaatggaacgaaagctcctcggatagagaagaacgtacgtcatataactgcgacaataaataaaccgatgagagtggcaaaaggctattgtaacagtctgtctattgctcctacctctaaaacgacttctgttgctgtgatttcattgaagaactccagtttgcagcgtggacaggattttatcaaccagttgcttgagatgtataatcgcaatacgaacaatgataaaaacgaaatcgctcagaagacggctgagtttatcgatgaacgtattggcattatctcaaaagaattgggtagtacggaagctaatctggagactttcaagcgtgatgccggtatcacggatttgacaagtgaagctcagatcgccttggccggtaatgctgagtatgaaaagaagagcgtagagaaccgtactcaaatcagtctggtgaatgacttgcgtaagtatttgcgaggcaatgaatacgaagtattgccgagtaatgtgggtttgcaggatgccgccttgattggagctattgaacgttacaacgagatgttgatggaacgtaaacgcctgttgcgtacatcaacagagaataaccctacgattgtgaatttggatacaagtatccgtgccatgaaagccaatgtacaggctactcttgaaggaaccttgcaggggttgatgatcaccaaagagagccttgaccgtgaggcgagtcgttattcccgtcgtatcagtaacgctccgggacaggaacgtgcttatgtaagtattgcccgtcagcaggagatcaaggccggattgtatctgatgctgttacagaaacgtgaagagaatgcgattgctcttgctgctacagccaataatgcaaaaattatcgatgaagcaatagctgacgatactccggtatctcctaaaggcaaaatgatttatctgattgcattggtgttgggtattggaattcccgtcggtatcatctatttgattgaactgacgaaattcaagatcgaaggtcgtgctgatgtagagaaactgacaagtgtgcctgttgtcggtgatattccattaactgatgagaagaatgataagaatggttctatcgccgtcttcgagaacaagaataatctgatgagtgaaaccttccgtaatattcgtactaatcttcagtttatgctcgataatgatcagaaggtgatccttgtgacctcaactgtcagtggtgaaggaaaatcgtttgtctcgtcgaatttggctatcagtctttctcttttaggaaagaaggtggtgattgtcggactcgatattcgtaagccggggttgaataaagtattccagctctctaataaggagagaggtattactcagtatctttccaatcctgaaacggatttgatggagcttgttcaaccttctgatgtaaataagaatctgtttattcttccgggtggtactgttcctcctaatccaacggaactattagcccgtaacggcctggacagagcgatagaaaccttgaagaagaacttcgattatgtcatccttgatactgctcctatcggcatggtaacagataccttattaataggtcgtgtagcagacttgtcagtttacgtatgccgtgctgactacactcataaggcggaatatacattgatcaatgaactgtcttttgagaagaagctacctaatctttgtaccgtcatcaacggcgtagacctgaagaagcgaaaatacggttattactacggctacggtaagtatggcaaacactacggctatggtaaacgttatggctacggctatggatatggtcaagatacaaaaagataaatatctgaatatctatgaattataacttttttcagaaaaagggccccgcaaggggcttttctttttgttatctgaaataaaagcctcacctttgcattgttgatcaacaaaacgtgaataaaataacttgaatttgaatctttaaaaaaacgtattatgagtgtaatttacaaagttgttacgcgaccatctgacccgcgtgttcccaattctcccaagaaatattatccgcatctgatcactttaggtcagtctgtcaatctgaaatatattgcgcagaaaatgcagggctattcttctttatctatcggtgatatcaagagtgtgattcagaattttgtggagaaaatgaaagagcaacttctggaaggtaagtctgtgaatatcgaaggcttgggggtatttatgctgactgcttgttcgaaaggagcggatgcagcgaaagatgtcaatgctaaaagtgtggatagcgtacgcattttctttcaggcgaataaggaactgcgtatcacgaagacggctacccgtgcagatgaaaaactggatttgatcagtttggatgaatatctgaagaagttgaacgcctctgtgactccgaatgatccggatgatggtgaaaatggcggtggtggaaatgaaggaggaggagatgaggaagctccggatccgactgtataatctgaaaagcttaaaaaagaaaggaggaaaaatctatgaagaaaacttggagtgtagttttgaaagtaatcattgctgtagccggtgcgattgccggagtactgggagtacaggctgcatcattgtaagcagcattcagtaaataaagtaattggttagataagacaggcaggcgggaagaactttcccgcctgctttgttgtatgctaaaatatcaaatagttggcgttactttttcgtgtgcgataacgaaaacacaaaaaataacattttattatgtagaaaaaaatgagggaatgcttcgtagttcacaaataatgattaaatttgccgcgatttgtaatgttgagtttgcaaaatgacgaataatactataaagcatctaggtattgtggaaaacatacagggttctcatctgtcggtgagaatcgttcagacgtcggcttgtgcggcttgtagcgcaaaaggccactgttcttcggcggatagtaaagacaaagtcatagatataacggatgttacagctgcttcctatcaggtaggagagcgggtgatggtgatcggcgaaacgtcgatgggcatgatggctgtaacccttgcattcataattccttttgtacttctgattgtttccctgttcgcatggatggcgttgatagggaatgaactgtatgcggctcttctttctctggcagttcttattccttattatttcgtattgtggctcaataaaacgcgaatgaaacaacatttttcatttactataaaaccaataaataactaaaacattatgaatttgattctgattgcagtgatttcattgggagctatagcgctcgtgctggccgctattctttatgtagcttccaagaaatttgccgtgtatgaagacccgcggattgcccaggtgggggaagtgttgccccaggcaaactgtggtggatgtggctatcctggttgtagcggatttgccgatgcttgcgtcaaagccggttcgctggatggtaaattctgccctgtaggcggtcagcctgtcatggcacaaattgctgatattctcggactggcagctactgaagctgaaccgatggtagcagtagtaagatgtaacggaagctgtgccaatcgtccgcgtattaatcaatacgacggtgcgaagagttgcgctattgccgcttcattgtatggtggagaaacaggttgtagctacggatgcctcggatgtggcgactgtgtggctgcctgccagttcgatgctatccacatgaatcccgaaacgggacttccggaagtggatgaagccaaatgtacggcttgtggcgcttgtgtgaaggcttgtccgaaggcgatcatcgagattcgtccgcaaggcaagaaatcacgccgtgtgtacatctcttgtgtgaacaaagacaagggagccgtagcacgtaaggcttgtacagtgagctgtatcggctgtggtaagtgtgtcaagacttgtccgttcgaagccattacgctggagaacaacctggcttacatcgatccgaacaagtgtaaatcatgtcgtaagtgcgtggaagtttgtccgcagaacacgattatcgagctgaacttccctccacgtaaaccgaaggcggaagaagcaccgaaaacagttgctgcagaagctccgaaggtaacagaataataacagaataaaatacagaattgtatgttaaagacattttcaattggtggagttcatccacacgaaaataaattgtcggcacatcaacctatcatcacggcggaagttcctgcaaaggcagttattctgttggggcagcacattggcgcacctgccaaaccgatagtagcgaaaggtgatatggtgaaggtaggcacgaagattgccgaacctgccggcttcgtttcggcagcaattcactcttctgtcagtggaaaagtggcgaagattgatacagtagtcgatgcgagcggttatgcaaaacctgctatctttattgatgtagaaggtgacgaatgggaagaaaccattgaccgtagcaagacactggtcaaagaatgtgagctttcgtccgaagaaatcgtgaagaagattgccgatgccggtatcgtaggtttgggtggtgcttgtttccctacacaggtgaaactttgtccgcctccttcgttcaaggcagaatgtgtgattatcaatgcggtggaatgtgaaccgtatctgactgccgaccatcagctgatgctggaacacgcggaagaagtcatggtaggtgtctccattctgatgaaagccgtgaaggtaaataaggcatttatcggaattgagaataacaagccggatgctattgaactgatgacgaaagttgcttccagttatgcaggcatcgaagttgttcctttgaaagtgaaatatcctcagggtggtgagaaacagttgattgatgcgattaccaaacgccaggtggcaagtggtgcgctgcctatctctactggggcagttgtgcagaatgtgggtacggcatttgctgtttatgaagctgttcagaaaaataaaccgttgtttgagcgtgtgattaccgtaactggtaagtctgtggccaaaccttccaacttcctggctcgtatcggtacaccaatgaaacagctgattgatgcttgtggcggtctgccggaggatacgggaaaagtgatcggtggcggtccgatgatgggtaaggctctggtgaatatcgaagttcctaccgcaaaaggcagttccggtatcctgattatgaatcagaaggaagccaaacgtggtgaagcacaaacctgtatccgttgcgcaaagtgtgtgagcgcttgtccgatgggactggagccgtacttgctcggagctttgtccgaaaacggagattttgaaacaatggaaaaagaaagaatcatggattgtatcgagtgcggttcctgtcagttcacttgtcctgccaaccgtccgctgcttgattactgccgcttgggtaagggtaaagtaggagctatgattcgtgcacgtcaagctaaaaaataacgaagtatggaaaataaattaatcgtatcactatcaccccacgtgcatggcggagacagcgtacagaaaaatatgtatggcgtgctgatcgcactgattccggcttttctggtgtcgctttatttcttcggcctgggggctctgattgtcacggctacttcggtagcagcctgtttattcttcgaatgggcgatcgttaaattcttaatgaagaaacctgctacaaccatttgtgacggttctgctgttattacaggtgtgttgctggcattcaatctaccttccaatctgcctatctggattatcattctgggtgcactgttcgcaatcggtgtaggcaagatgtctttcggtggtctgggctgcaacccattcaacccggcattggcgggacgtgtattcctgttgctttctttcccggtgcagatgacaacatggccggtagtaggtcagctgacatcttatatggacgctaccaccggtgctactccgctggcattgatgaaacaggctattcacggcgatgcaagtgctttgagccagatacctgatgcgctgactctgtttatcggacagaacggcggatgtatcggtgaagtaagtgcgctggcactgttgctcggactggtatacatgctctggaaaaagatcatcacctggcatattccggtttctatcattgtgactgtatttgtatttgcaggcattatgcacatggtggatcccgaaaagtatgtttctccggtattgcaactactctccggaggtctgatgctgggagctgtctttatggcaaccgactatgtgacttctccgatgagcaagaaaggtatgctgatttacggtgtttgtatcggtctgctgacggtggttatccgtctgttcggtgcatatcccgaaggtatgtcattcgccatcctgattatgaatgcgttcactccgctgattaacacctattgtaaacctaaacgctttggggaggtagcgaagaagaaatgaaaaagttacaatcatctttaaagaatatgttgctggtacttacgggcgttacagccgtttccgtagcgttgctggcttatgtgaacgaactgacgaaaggccctattgccgaagcgaatgcaaagacgctgaacgaggccttgaaaaaggttcttcctgaatataccaataatccggtagccgaaagcgatactgttttcagcgagaaagacggaaagaaaatcgtggatttcattatctatccggccaagaatggcgaaaagtgggtaggttctgccgttgaagccaagtcaatgggatttggcggtgaactgaaagtgctggtgggctttgatgctgaaggcaagatttataactactctttattggcgcacgctgaaactccgggattgggttcgaaagcggacaaatggtttggagcttatgatcctgcaaagaacgaaaaaccggtatctcacgaagaaagtgcaaagtctattttgggcatgaatccgggagagactccattggctgtgaccaaagacatgaatggacaggtagatgctatcacggcttctactatcacttcacgtgctttcctgaatgcggtgaatgctgcttatcaggcatataaaggcggtgaggtggatacgaattccggagcttcccagaaaaatgaaccggctgctgcaccggaaggtgaagaagctgctaatgacactaataactaagaaaggaggagacagttatgaataattttaaagtaatgatgaacgggattatcaaagagaatcctatttttgtgctcctgctcggtatgtgtcctacactgggtacgacatcatcggcaatcaacggtatgggtatgggactggccactatgttcgtcctgatttgctcgaacgtggtaatttcatctatcaagaatctgattccggatatggtacgcatcccttcatttatcgtggtgatcgcgtcattcgtgacactgttgcagatgataatgcaagcatacgtgcccgatctgtatgctaccctcggtcttttcattccgctgatcgtagtaaattgtatcgtattgggacgtgcggaagctttcgcagcgaagaacaatccgctggcttctatgtttgatggtatcggtatgggatttggttttaccattgccctgactctgttgggtgccgtacgtgaattcctcggaacaggtaagatattcaatctgaccattctgccggaagaatacggaatgctgatctttgttctggctccgggtgcctttatcgctttaggttatctgattgccattattaatagtctgaagaaagcctaactctattaaataagaaaagaatatggaatatatattgatatttatctcggcaatctttgtaaacaacattgtgttgtcgcagttcctgggaatctgtccgttcctgggtgtttccaagaaggtggaaacagcgatgggtatgagtgcggcagttgctttcgtgctgactatcgctaccatcgtcacattcctgattcagaagtttgtgttggacgctttcggattggggtacttacagacaatcacttttattctggttattgccggactggtgcagatggtagaaattattctgaagaaagtttctccttctttgtatcaggcactgggggtgttcctgccgttgattacaacgaactgctgtattctcggtgtggcaatcctggtaatccagaaagactttgatctgctgacaggtgttgtatacgcattctctactgctcttggctttggtctggcactggtattgtttgccggattgcgtgagcagatgaccctggtgaagattccgaaaggaatgcaggggactccgattgctttgattaccgcaggtttgctggcaatggcattcatgggcttctctggcgtcgtgtaaaagactaagttgataattagataaagaggctggaaactctgtcgtatggcaacatacaggcagtttgtttccggcctttttctttatatctgttcataccgaatatgttttttatcataccaaaacgccctcaaatcgtcccgtaagtatcttcctgtgaataaaattgcgatagtttattgcatttccattttatttccatacatttgtacctcaaacaaactgaaaaccgaaaaactaaccatattttaaaattatatgaaagaaagaattttagtaacgggaggaacaggctatattgggtctcataccgttgtagaactacaaaacagtggatacgaagtaatcattatcgataatttatcaaattcgagtgctgacgttgttgacaatatagagaaagtatccggtatccgcccagcttttgagaaactggattgtcttgattttgctggccttgatgccgtatttgccaaatataaaggaattaaagcgattattcatttcgcagcaagcaaagcagtaggagagtcggtagagaagccgttgctttattatcgtaacaacctggtttctttaatcaaccttctggagttaatgcctaaacatggagtagaaggcatagtgttctcttcttcctgtacagtatatggtcaaccggatgagttgcctgtaacggaaaaggctccgatcaagaaagcggaatctccttatggaaatacaaaacagattaatgaagaaattatccgtgatacaatagcttccggtgccccgatcaatgctattttgttacgttatttcaatccgattggcgcacatcctacagcattgctgggtgaacttccgaacggtgttcctcaaaacctgattccttatctgactcagacagcgatgggtatccgtgaaaaactaagtgtattcggtgacgattatgatactcctgacggttcttgtatccgtgactttatcaacgttgttgacttggcaaaagcacacgtgattgcaatccgccgtattttggagcaaaaacagaaagaaaaagtagaagtatttaatatcggtacaggacgcggcgtttcagtattggaactgattaatggctttgaaaaagctaccggcgttaaattgaattatcagattgtaggccgtcgcgcaggtgatattgaaaaggtatgggctaatcccgattatgcaaaccaggaactgggttggaaagcggtagaaacattagaagatactttacgctctgcatggaattggcagctgaaactccgtgaaagaggcattcagtaaaaagatatttgttttaattaacataaaagtttaaacaaatcgttcatgcgatttgtttattagatgctaatcagcttgatctgtttgtgagtatgtgaatatgagtaaatggtacttatgcctctccggcatagacaggtatgattgcatagtagttttgtcgtgttttattttgtgtttgtgttgtgacggtactacgacgggagtcgtggtaccgttttttgttactcttttacagcctgcctttaaaacagaatacgttagttccccaatcggtttcaggtaaagttccttccggctcgaacaatccgtatacggaagaaccggaaccgctcatagaggcataaacagcaccttgcttgtatagttcggctttaatttctccgatcaccggatgctgggggaatacgctgtcttcaaaatcattgattaatatctctttccattcatttaccgggcgtttgatcgcttctttgatcgagtattcgggatgatgagggtgaatattggcgaaagcttcccgcgttgatacgaatacatccggtttgatgatcagaatctgatatccttttaaggatagtggaatgggggagaatatgttaccgattccttcggcaaaggtcggggcgtttctgataaagaaagcgcagtctgctcccaaagttgcggcatatatttccagctgatcttcggataaattcagctgaaagtgttcgttgagtaatttcagcatgaaagccgcgtctgatgagcctcctcccagtccggcaccggaaggaatgtgtttgtacagatggatctcgataggacagaggtgaaactctttatctaatagcagatatgctttcaccactaaattgtcttccggattaccggatatctccattccgtactgatgcagggagaactttttgtccgcttcggggctggtccggatttccagcgcatcttcgagagcgacggggtagaatacggtttcgaggttgtgatatccgtccggacgcttctcggtaatagagagtcccaggtttatttttgcgtttgggaaagtgatcatattcgttctgaattattatttttgaattttaaattatgggttgcgaatttatgctattggtgacaaagttactaaaatcttcatttttccttatcttttcttcattattatattctatctttgtcatccctttcggattttactatgtataaaagccggggatcataaattgtaaatcataaaattgtatataagcagatggctgaacaaagaagaaattcccgtaacacaaaatcaactaaagtacaaccggtcaatgattatggtcgtatccaacctcaggcaccggagctggaagaggcggtgttgggtgctttaatgattgagaaggatgcttattcgctggtgagtgagattcttcgcccggagtcattttatgagcatcgtcatcagttgatttatgctgccattactgatcttgccgttaatcagaagccggtggacattctgacggtcaaagagcagttgagcaaaagaggtgagttggaagaggtcggtggaccgttctatattactcagttgagcagtaaggttgcttcttccgcacatatcgaatatcacgcccgtattattgcacaaaaatcgttggcgcgcgaattgataacgtttaccagtaatattcaaagcaaggcttttgatgagacactggatgtggacgacttgatgcaggaggcggaaggcaagctgtttgagatttcccagcagaatatgaagaaagactatacgcagattaatccggtaattgacgaagcgtataagctgattcagaaagcggctgcacgaacggacggtctgagtggtcttgaaagtggatttacgaaactggacaagatgacctccggttggcagaactccgaccttattataatcgctgcccgtcctgccatgggtaagacagctttcgtactttctatggctaagaatattgctgttgattatcggaatccggtagcgttgttctctcttgaaatgagtaacgtccagttggtcaaccgtcttatcaccaatgtttgtgagattccgagtgagaagatcaaaagtggacaattggcaagctatgagtggcaacagttggactacaaactgaaagacctgctggatgctccgctttatgtggacgatactccgtctttgtctgtgtttgaactccggaccaaagcacgtcgtctggtgcgtgaacatggggtgagaatcattattattgactaccttcagttgatgaatgcgagtggtatggcattcggtagccgtcaggaagaggttagtacgatatcccgttcgttgaaaggattggcaaaggagttgaacattcccattatagccttgtcgcagttgaatcgtggtgtggagagtcgtgaaggtattgacggtaaacgccctcagttgagtgaccttcgtgaatccggagccatcgagcaggatgccgatatggtgtgttttattcaccgtccggaatattataagatttatcaggatgatcgtggtaacgacctgcgcggtatggcggaaattgtgatagccaagcatcgtaatggtgcggtaggtgaagtcttgctccgattcaaaggtgagtttacacgattctctaatccggaagatgatatggttataccgatgccgggtgaacctgcaggtgccatgctggggtctaaactgaatgccggtgctatgcctccgcctccgccggaaccggactttgttccgcagggaaataatccgttcggtgcaacggaagggccgttacctttctaaaaaaacgttcgtttgggttgaatagaatgaccgcttagtcagatgaaaataaccgctcgatttactccaatcgagcggtcgattattttttatagagtatagccaagttgtattctgatagggataggtggcaaaaatgacaaagaatacccctttgttttttgccactttgtcaccaaccatgaatttattggggaataatacagtcaggtccttgttagtttagcttctcttgacatttttctctcaaatcgttctatgtcaaccgaaaaatcttattaactttgcgaaactttttgagaaacaataaaaatttaattatatgaatatctcttataactggctgaaagagtatgtcaactttgatttgacccccgatgaaacggctgctgcgctgacctcaatcggcttggaaacaggtggtgtagaagaagtgcaaaccattaagggtggtttggaaggactcgtaatcggtgaagtgctgacttgcgaagaacatccgaattccgaccatttgcatatcactaccgtcaatctgggagacggcgaacctgtacagattgtatgcggtgctccgaatgtagctgccggacagaaagtagtggttgccactttgggtaccaaactttatgacggtgatgaatgctttactatcaagaagtcaaaaatccgtggtgtagaatctacagggatgatttgtgcagaagacgaaatcggtattggtactgatcatgcaggaatcatcgtgttgccggctgaagctgttccgggtactctcgccaaagactattataatatcaagagtgactacgtactcgaagtagatattactcctaaccgtgcagacgcttgctcacactatggtgtggcccgcgacttgtatgcttacctgattcagaatggcaagcaggctactttgcaacgtccatctgtagatggatttaaggtggaaaatcatgatttggatatcgaagtagtggttgaaaacagcgaagcctgtcctcactatgccggcgttacggtgaaaggcgttactgtgaaggaaagccccgaatggttgcagaataaattgcgcttgatcggtgtacgtcctattaataatgtagtggatattactaattatatcgttcatgctttcggtcagccattgcattgtttcgatgccggaaagataaaaggcaatgaagtaattgtcaagacattgccggaaggcactccattcgtcacattggatgaagtggaacgcaagttgaacgaacgcgatctgatgatctgcaacaaagaagaagcgatgtgtattgccggtgtattcggcggactggattccggttctacggaagctacgacagatgtatttatcgaaagcgcttatttccatcctacatgggtgcgtaagactgcccgtcgtcacggtctgaatacggatgcttctttccgtttcgaacgtggcatcgatccgaacggagtaatctattgtctgaaactggctgctctgatggtgaaagaactggccggtggcactatctcatccgaaattaaggatgtttgcgttgcagctccacaagactttatggtagaactttcttatgagaaagtaaattcgctgattggtaaagtgattcccgtggaaacgatcaagagcattgttaccagcctggaaatgaaaatcatgaatgagacagttgacggactgacattagccgttcctccttatcgtgtagacgtacagcgtgattgcgatgtgatcgaagatattctacgtatctacggatataataatgtagaaatcccgactacgctgaactccagtctgacaaccaagggtgagcatgataaatcaaacaaattacagaatctggttgcagaacagttggttggctgtggcttcaatgaaatactgaataattctctgactcgtgccgcttactacgacggtctggagaactatccatccaaccatctggtgatgctgctgaatccactgagtgccgatctgaactgtatgcgtcagacattgctgttcggtggactggaaagcatcgctcacaatgcaaaccgcaagaatgccgatttgaaattcttcgaattcggtaattgctattacttcgatgcggacaagaagaatccagaaaaagtactggctacctattcggaagactatcacttgggtttgtgggtgactggaaagaaagtagccaactcatgggcacacccggatgaaaacagttcggtatacgaattgaaggcttatgtagagaatatattgaagcgcctgggactggatttgcacaacctggtagttggcaatctgactgacgatattttcgctaccgcactttctgttcataccaagggggggaagcgtcttgcctctttcggtgttgtgacgaagaaactgctgaaagcattcgatatagataatgaggtgtattatgccgacttgaactggaaagaactgatgaaggctatccgttcagtgaagatcagctacaaggaaatttccaaattccctgctgtgaagcgtgacttggcattgttgctcgacaagaacgtacagtttgccgaaatcgaaaaaatcgcttacgatacagaaaagaaactgctgaaagaagtggaactcttcgatgtatacgaaggtaagaacatcgaagcaggtaagaaatcgtatgcggtcagcttcctgcttcaggatgaaactcagacgctgaacgataagatgatcgataagatcatgtctaaactggtgaagaatctggaagataagctgaatgcaaaattgagataaatttaaaattcacaattcaaaattaatacaaaccaatgggaagagcatttgaatatagaaaagccgcaaagctgaaaagatggggccacatggctaaaacatttacaagactgggtaaacagatcgctattgccgtgaaggcgggtggtccggaaccggaaaataacccgacactgcgttcggtcatcgctacttgtaagcgtgagaatatgccgaaggacaatatcgaacgtgcgattaagaatgcaatgggtaaggaccagagcgactacaagagcatgacttacgaaggatacggtcctcacggaattgctgtctttgtagatacgctgactgataatacgactcgtacggtagccgatgtacgctctgtattcaataaatttggtggtaacctcggaacaatgggatcattggctttccttttcgaccataaatgtatgttcactttcaagataaaggacggcatggatatggaagaactgatccttgatctgattgattacgacgtagaagatgagtacgaacaggatgacgaagaaggaacaatcactatctacggtgatcctaagagctatgccgctattcagaaacatcttgaagagtgtggcttcgaggatgtcggcggtgattttacttatatcccgaacgatctgaaagaggtaactccggaacaacgcgaaactttggataagatgatagaacgtcttgaagaatttgatgacgtgcagactgtttatacaaacatgaagccggaagaaggcggaaacgaggagtaagcggattatggaatatgtttatagaacccagggtacttgcagcacaaacatcgaactgaatgtagaagatggagttgtgaaggaagttgccttttggggaggatgtaacggaaatcttcaaggactttcacgtctggtaaagggaatgaaggtagaagaggttatcaagaaacttgaaggagtacgttgcagtggcagaccgacgtcctgtcccgatcagttgtgccatgcactgcatgaaatgggatattaacggaagtctccctttataaaatatacactggcctccggcaattcattttgccggaggttttttattgtgccgtacctttccctatttgtcggtattttgaaccaaaatcgaccttcggtcgttatttataagtatatttgtgctgaataaactattatgcaatgatgaagaatatttttcaagacttaaaacggaaagatcataaacgttatctgggcggactggatgtttttaaatatattggtcccggacttttggtaactgtcggatttattgatccgggcaactgggcatcaaattttgccgcaggttccgagttcggctattcacttctttgggtggtcaccttatccactatcatgttgattgtcctccagcataatgttgctcacttggggattgttacggggctttgcctttcggaagccgctacgaaatatactcctaaatgggtatcccgtcctattttgggtacggcggtattggcgtctatttctacttcattggctgagattctgggaggagccatcgcattggagatgctgtttgatatgcctattatgtggggggcggtgctgaccacactttttgtctccatcatgctctttaccaactcctataaaaagatagaacgttccattattgcttttgtctcggtgatcggtctttcatttatttatgaattgtttctggtagaaatagactggccggctgcgacgatgggttgggtgacgcctgctttcccgaagggtagtatgctgattattatgagtgtgctgggagcggttgtgatgcctcataatctgtttctgcattcggaagtaatacagagtcacgagtataataagaaagacgatgcgtctatcaagaaagtattgaaatacgagttgttcgatacgcttttctcgatgatcgttggctgggcaattaacagtgctatgattctgctggctgctgctactttctttaaaagcggcattcaggtggaagaattgcaacaagccaaatcactgcttgaacctttgttgggaagtaatgcggcaatcgtattcgcattggctctgttgatggcaggtatttcgtccactataacaagcggaatggcggcaggttctatctttgcaggtatctttggagagtcatatcatattaaagacagtcactcgcaggtaggagtaatcctttcgttgggaattgcgctgttgctgattttctttattggtgatccattcaagggattactgatttcgcagatgatattgagtattcagttgcctttcacggtattcctgcaagtagggttgacttcatcccgaaaggtaatggggaattatgtcaatagccgttggagtacttttgtattatatgctattgcagtcattgtttcggtattgaatataatgctgctgttttcataaaacgaacataaatctataaactataaaatgatgaagattattacttataatgtgaacgggcttcgtgctgccgtttctaaaggtttgccggaatggctggtgcaggagaatccggatattctttgtctgcaagagacaaaactacagccggaccaatatccggcagaagtatttgaagctttgggttacagggcttatctctattctgcacaaaagaagggatacagcggtgtggcgatccttactaagcaggaacccgatcatgtggaatatggtatggggatagaagcttatgacaatgaagggcgttttatccgtgcggattttggcgacttgtccgtagtcagtgtttatcatccttcgggaacgagcggagacgaacggcaggcatttaaaatggtgtggctggaagactttcagaaatatgtgacagagctgcgcaagactcgtccgaaccttatcctttgcggtgactataatatctgtcatgagccgattgatattcatgatcctgtccggaatgccacgaacagcggcttcctgcccgaagaacgggaatggatgactcgtttcctttctgcaggatttattgattctttccgtctgctctatccggagaaacaggagtatacgtggtggagctatcgttttaattcgcgtgccaagaataaaggctggcggattgactattgcatgaccagtgagccggtacgtccgatgctgaaaagtgccagcatactgaacgatgccgtacattcagatcattgtccaatggctttggaaatagaataaaaacagaaaatagcatggaagatagaatacaaaaagctgtagaactttttaagagcggatataactgctcgcagtctgtagtagctgcatttgccgatatgtatggtttcacacaggagcaggcagtgcgtatgtcagcctcttttggcggaggaatcgggcggatgcgtgagacatgcggggctgcttgcggactgttcctgatagccggactggaaaccggagctaccgaagcgacagatcgtgaaggaaaagctgcaaactatgcggtagtgcaggaattggctgccgaatttaaaaaacgcaacgggtcgttgatttgcggagaattgttgggattaaagaaaaaagagccgatttcgactgttcccgaagaacgtaatactcaatattatagcaaacgtccgtgtgctaaaatggtggaagaagcggcaagaatctgggtagaatacctcgaaaaacaccctaaataaggggataaaatgcttttttattacaaaatcagcaaaaaaagattcaataaagtgttatataacataaaaataactatctttgtccccgaaataaaatctgaaagctttcgggccggatgatttttaaagcatgtctaactataatttcaaaagcaaatgttgaaagaaaaagcaggtgtaatcgcaggtaatatctggaatgcactgaatgaaacagaaggaatgactgccaagcaactgaaaaaagcaactaaattggttgacaaagatttgttcctcggccttggctggttattgagagaagataaagtttctgctgaagaagtagaaggtgaactcttcatcaaattgatctaagcgagtaactcacttaagcaataaaaaaatgcgttggtacatgattataatgttatcaacgcatttttttatattccgccatttacgtatctttgcacaccaaaaagacaaaataataagaattcagaatgaagaatatacgaaatttctgcatcattgcccacattgaccacggtaaatcaaccctggcagaccgcttgctggagtttaccaacactattcaggtgactaacgggcagatgcttgatgatatggatttggagaaggagagaggtatcaccatcaagagccacgctatccagatggagtacaactacaaaggtgaaaagtatatccttaacctgattgacactccggggcacgtggatttttcgtatgaggtatcccgttccattgccgcttgcgaaggtgcgctgcttatcgtagacgcatcgcagggagtgcaggcacagaccatctccaatctgtatatggctatcgaacatgatctcgaaattatccccattatcaataaatgtgatatggcaagtgccatgcccgaagaggtagaggacgaaatcgtagaactgttgggctgcaagcgtgatgagattatccgtgcatccggtaagaccggaatgggcgtggaggaaatcctcgcagccgttatcgaacgcattccgcatcccgaaggtgatgaggaagctccgttgcaggcattgatttttgactctgtattcaactccttccgtggtattatcgcttactttaagatcgaaaatggagtaatccgcaagggagataaagtgaagttctttaataccggaaaagagtatgatgccgatgaagtaggtgtactgaaaatggaactggttccacgtaacgaacttcgtacgggcgatgtaggttacattatatcgggtatcaagacctcgaaagaggtgaaagtgggagataccattactcatgttgcccgtccgtgtgataaagcgattgcgggttttgaagaagtgaagccaatggtttttgccggagtctatccgattgaggcggaagattttgaggatctgcgtgcttctttggaaaaattgcagttgaatgacgcttcgctgactttccagccggaatcttcattggcactgggcttcggtttccgttgcggtttcctcggattgcttcacatggagattgtacaggaacgtctggatcgtgaattcgacatgaatgtgattactaccgtgcctaacgtatcttataatatatatgataaacaaggcaatatgaaagaagtgcataaccccggtggtatgcctgatccgacgttgatcgaccatattgaagaaccttatatcaaagcgtctattattacgactaccgattatatcggcccgattatgaccctctgtctggggaaacgtggagaactcttgaaacaagagtatatttccggtaatcgtgtggaaatatattataacatgcctttgggtgaaatcgtgatcgacttctatgaccgattgaagagtatttcgaaaggatatgcgtcgttcgactatcatcccaatggtttccgtccttccaagttggtgaaactggacatcatgttgaatggtgaaccggtcgatgcgctttctacgctgattcacttcgataacgcgtatgatatgggacgccggatgtgtgagaaactgaaagaattaatccctcgccagcagtttgaaatcgctattcaggcagctatcggggctaagattatagctcgtgaaactattaaggcagttcgcaaggatgtaactgcgaagtgttatggtggtgacgtaagccgtaaacgtaaactgcttgaaaagcagaaaaagggtaaaaaacgaatgaaacaaatcggtaatgtggaagtgccgcagaaagccttcctcgccgtactgaagctggattaaaaaatgaaccgcaagcgatttttcagagagttattctgaacaaatcggcttgcggttagttttttaatacaccaggtgattgtcttctgtctgcagagctttccttggcaatcaccttttttgaaacaaacaactataaatatgagaaaagttctgtctttttcgggcttcctgatgttggggctcgtcatttcacaattcctcccgatgatagcgggagaaggatatggaactgttaaggtcctgtcgaatatactactttatgtatgtcttagttttataatgattaatgtgggtcgggagtttgtgctcgacaaagtccgctggaaaagttatgccgaggattatcttatagcgatggctacagctgccctgccttggttcatgattgctatctattatgtattcgtgcttcttccgcctgattactggaatagttgggaggcttggaaagagaatctgttactaagtcgttttgccgcacctacgtcggccggcatcttgtttacgatgctggcggctatcgggttaaagtccagctggatatataagaagattcaggtcctggctatttttgatgatctggataccattcttttgatgatccctcttcagatcatgatgattggtttgcgttggcagctgattattgtggtggttattgtatttatgctgttgtccattggatggaaacaactgaataagtataactggcggcaggattggaaagctattctcttctattccgttatcatatttctggctacgcagatactttatctcggcagtaaagagctgtatggagaagaaggaagtatccatatcgaagttctgttgccggcatttgtattgggtatgatcatgaagcataaagagcacgatactcctgtagaacgaaaagtctctactggaatctccttcctgtttatgttcctggtaggtatgagtatgcctcattttatcggagttaactttgcggaaactcatacaggaacgcattcggtgacaggttcgcaggagatgatgtcctggggaatgattttgttccatgttgtcatagtctctttcttatcgaatataggcaaactttgtccgatgttcttctatcgtgaccggaagttgagtgagcgactggccctttccattggtatgtttacccgcggtgaggtaggtgccggaattatatttattgcattgggttataatctcggcggtccggcactggtcatttccgtacttacattggtgttgaatcttattctgacaggaatatttgtcctttgggtgaaaaacttggctttaaggagctataatgattaaaaaaatccatatattgcggatcaaatactataaacacctttcattatgacaattttgcgtacaatgcgaaatttctcgtcaatgaatattgcggcgagtatccttttgtttgtagcggcaatagcggctgctatcatagccaattctccggttgctccggtttatcaggagttccttttgcatgaacttcatttgcagatcggtaattttaatctgctttcgcatggcggagagaatctgcggatgatcgagttcatcaatgacgggttgatgaccatctttttcttgctggtaggattggaaatcaaacgggagttgttggttggtgagctttcttccttccgcaaggcggcgcttccctttattgctgcctgtggcggtatgctgtttccggtgattgtttacatgtcaatctgtcctccgggcagtgcgggaagtcagggattggccattccaatggcaacggatattgctttttcgttaggggtattaagtctgttgggaagccgtgtgccgttgagcctgaagatatttctgacggcttttgcggtagttgatgatatcggaggtatccttgtaattgctcttttttatagttcgcatgtgtcgtatgggtatattctgatagccgcattgctttacgttttactttattttatagggaagcgtgggactaccaataagattttctttttagtgatcggtgtcgttatatggtatttatttttgcaatccggtattcatagtaccatttcgggagttattctggcgtttgttattccggcgaaaccccgtctagatgttggaaaatatatcgagcatattcgtcatacaattgcaggtttcccggtggtggaatcgggaagtatcgtattgactaatgagcagattgccaaactgaaagaggtcgaatctgcttccgaccgtgttatcagtcctctgcagtctttggaggataatttgcatggagctgtcaattatctgattcttccgttgtttgcctttgtcaatgcaggcgttgtctttagtggcggcggtgagttggtgggaagtgtagggatggcagtggcagcagggttgctgtttggtaaatttgcgggaatttatttctttacctggttggctataaagataaaacttactccaatgccgccgggcatgacttggaagaatctttccggtatagctctgttgggagggatcggttttacggtgtcgcttttcattgccaatctttcttttggtgcaaactaccctgttctgttgaatcaggctaagttcggagtgctatcggggactattctttccggattattaggatacattgtactcaggatagtattacctgtccgaaagcggaaataataactagagatcagtcgttcaggcatatcggatattcatcaggcgatatgccttttttattgtatatataatataaggtgaaaatgatatctactaataatattagttaaacaactgctttatttagtagattaactaatagtgttagttgtttgtttgaaaaatagtattatatttgtgccattggaagaacaataaatatgtagactatgaaacagatgaaacgattgaccgtcaaagaggaagaaattatgcgtatattttgggaacatggacctatgtttgttcgtgaacttctatcattctatgatgaaccaaaaccgcattataacacagtttctacccttgttcgagggctggaggagaaaggttttgtggggtataaagcctacggaaatacttatcaatattatgctcttgtttcggaaaaggagtataagagttcggcactcaaagaagtggtttcccagtattataataattcctatatcaatgtagtgtcttcttttattgaagaagaagggatgtctgttgatgaactaaaatcgctgatagagtatatagagcaaagtaaaaagaagaagtaatctctctctggtctatcggacagatacgatttttattctatggacaaacaacttttaatctgaaaacacaatgggagcttttttattctatctgctgaaatccggatgttgcttagtggtcttttatattttctttaagctgctgatgagccggagtacttttttccgttttaaccgcatcactttgttggttgggttgttaggatgtactttgcttccacttattgagctgacaactaccgaggagacttttttgcatactccgttgtatgccattcacgagatattgcaaagtacggagtctgtcattctaaatccggaacagatggaagatcctattcttatatctgaaaagaatccggaaataaactctttgaattggattcctgtgactttagcttttatatatggagtgggggctttggtgacactgatctggttgtctttgtccacttgtcgtttgattcagttgattcgtacgtcagagaaaaaacagtttggaaactatgtattagtgattcctcagcagccaactgcttcatttagctggggtaaatatattgttatttcagcagctgactactctcaacagtccgaagaaatactcctccacgaaacgatgcatttacgaaatcatcatactttggacttattgtttatgcagatattcctgcttgtttattggtttaatcctgtcgtttggctactaaaacgggagttgcaggaagtacatgaatttgaagccgataatggcgtaattaatacaggcatcgatgcaactaaatatcaattattactggtgaaaaaagctgttggtacaaggctctactctatggctaatggctttaatcactctaaacttaaaaaacgtatcactatgatgttaaaagaaagaaccaatcgttgggcacgattaaagctgttgcttgccgtgcctgtgatggctggagcgctttatgtgtttgcacagccggaagtgaaagaagttccgcgacagattcagtctgaacttcagcagaaagaagcggatgattattcatctttgatgttttttttcaaagaagggggagagagatacagcaagctggttaatggagcgtatccaccctctaagattaaagcaagacaggttcactccctttttgttaataaacaaaatagggtgatgttcgataatgatgtatgttcagtggatgagttgaagtctactattgtgaagaatttgatgaaatcctgggaagaaagtaagaggaaagaataccaagttatttcttttcaggttgatcgcggaagtgaaattgctgcactcactactatactcaaagaagtaaaaggagcatttgagcaaattcgtgctgatttgtctattacattgacagataaaagtgaagaagcgttggaccgattgtttcccgttctactgtcggaaggtgctgcgagaaattatggattgaaagagctgtcaatggaggagaaaatcagtgggattgtggtaacaattcacacttcggaagggaaggaagtaatgaaagattttactttaacggaattgaaacagaaagtcactgctgcacgtgcaaagcaagctgatccggaaagtttggttattggcctcaagatagagaaagggtgtaagatgggatacgtgacggataccaagcaggtgctgagggaatgtagtgcattgaagattaattattcaactgataactaattagtttataaatagtgtcactatatagccagcatagtgacactatccaatcagcatagtgacactatcccaaccggatagcgacaccatcttaaaaggtctataatttttgttttattcatcatccccgtcatccgctatcggcagaattctctgactttcctcatggggcaattgttctacttggcgtagtttccgttcaatagcgcgggttctttttcccatcacttcttccagttggtcaccggcactttgcaggttcttctgtaccttttcgagtaggcctccgaatttgctgaattcagttttaactgctcccaaaactgtccacacttctccggtacgcttttgaatagccagcgtgcggaaccccatctgaagactgttcaatatagcaccaagggtagttggtcccgtcactacaattttatattctttttgtagcgtctctaccaagcttgttcttcggatcacctctgcatagatgctttcaaaaggcaggaacatgatggcaaagtctgtggtgaaaggcgggtctacatatttatcgtgaatatctttcgccattttcttgatggttgtttccagctgcttgccggatgattccatcaatgcagtatctcctgcctcgaaagcgtcgtagtattgctcatatacatctttcgggaattttgcatcgataggcaggtatacagtgctgttcgcatcatccttacccggtaacttaatggcaaattccacaaattcagttccgcttttcttggttttcacattggcgtcatattgttccggactcatcatctgttccagcaatgctcctaactgaacttcaccgaatgtaccgcgcatttttacgttactcaatacttttttcagtccaccgacgtcttgtgcgagagatttcatttctcccagtcccttctgtacattttccagttgtgagcggacgatttcaaaggactgtccaatgcgttcattcaatgtcttctgcaatttttcttccaccatcagtcgcatatcatccagccgcttttcagtcgattttatcaagacctcttgctggcgtgccattgtgtcgaacttttggcgttgcagttccccgtttgtcatcatgttcttatgcagtacgtcttgcaattgttgcatattctgattcagcgtttgggtcatttccatgcgaagttcccggatactgcggtttagttcttcgcggttctcttgcatttgctggcgcaaggctgcctgtaattgttccgcttgcgcatgattatttccttttgccagtgatagtacaatcgagattactgctaatgcggcaataacaataagtagaatcagttccatcaataagtcagaatttcgtttccggtttcagtaatcagaatcatattctcccattgggcagaaggcagtccgtcatccgtgcataccgtccatccgtcagcttcgtcaacaaatacttcataagtacccatatttatcatcggttcaatggtgaaggtcatgcccggaacgatcatcattcctgttccccggcgtccgaaatgttccacatccggtgcttcatgaaactgcattcctacaccatgcccgcaaagatcgcgtaccacgttgaatccgttcttttctgcgtgttcctgaatagcggcgcctacatctcctaattgtttccaaggctgtgcggcggctatacctatttccatacactctttagtcacttgaaccagtttgcgcatttcgggacttacgtcaccgatcataaacatacgggatgcgtcggagaaatatcctttgtaaatggtagaaacatctacattgatgatatctccgctttgcagtatttctgttttgctgggaataccgtggcataccacatcattgatactggtgcagacgcttttaggaaatccttcgtagttgagaggagcagggatggcaccgtgctttgtggtgaagtcatataccatgacatcgatttcttcagtcgacattccttcacggatattctccgaaatataatccaacagggcagtattgattttggcactctcacggattccttccagttgttcgggagtacgcagtactttgcgcggtgggagtttgtaaccttgttttctgtatttctgtattttcgcttctacttcagccgggtaattggagggagtaaaccggaatcccttgataaagttcttcattattataggatgttttttaatcgtactacaaaggtacgagaataaatggaaaatgaaatcgtttatcatgtgattccttttttaccattcataagaaatacagatctgaggcacccattcccatcttttttgtatggtgttgtattgatattgtacgccggttttcaatttccagcctttacctacttttaaaacaatgtcgctgcctagtgtggttggtattgcttcagaggaaagtccacgatatcttcgggtgtccagattttgtttaccatatatgctaagaaaccattttttagagagcttataatccatttgagtttggatatgaaagtggtttgaactttcactaaagttacttttactatgcagagtgatatttttgtttattttgagccgtgaataagtgggtaagaaagtagaattggtctgtcgaaagatgttatgagtatgaaaaggtaatttcggagatatgattgttgatttaagaatcggtaatgttggatcaaagtcaacaaagggttttgtatgatataacatgttttgttctgtcttctttacgaataccttattgattctgatttcttgctcagaatttaatgtttgctgtagcctcaatgaatcttgtttgctccactcttgtcctgctacggataaggggagtaataatagacaaagagtacctaactgatatttataagcgtccatatagtgtgctagtatagtttattctatggacggtgaaaaagtgaaaatgctgctttatgtaatgaataaataatagctattttacataatatgagaatacttttctttttttgtataggtgtattaagcacatttatcgtgtccagtcgcacctatggaaacaaaacctatatagctgtttttttatgtattgagtgataagttctagtttcttgattggttcatctttcataaatcttgaatgatattgagagaaaaaatgaggtggaaaaatatagatgttataattacaaccactttttttctgagcattgcaggactcatagttcttattatcattctttaatgttttgtatttaagataatctttttgctttaaataccggttctatcttctgaatctccgattcaaatccgaaccaatagccatgtcctgcttcgtcaataggaagaaaacataaccggaggttctcacgatatgaaccatatataatttcccaattatcgggaggaacttggcgttttgtctttactttttcagcggggattttttttaacgacataccggcttctatccatgcaatactgacttgtgtcacgtaatcgggataatgattcttgcagaaattatagaggataagtccccttttttctagactcaaaggagtgtcgatgacatctgtctgtattagatggtcaagtaactcatgcaggaaatgcggattatccaaaatgagggtacgagtcagacttcgccatgtaggtgtattatagaatccgtctaaaagacgggacagatagtgggcggtttgcaattcttctacggaaatttctttagtctgcaaaacttcgtagggagggagaggagagtattggatgcctaactcttccgcccttcttcgcatttccgtgccgggaagtaattttaatgattccagttgtatttcccctgcaccatattcggcaagtgtacgaacgtcttcaaatatttcggataggtgatagagaggaagaccggctattaagtcagcatgtgtctccatgttcttaagggaacaaagatatttcagaccttgaagggcatcagataattttccgatacgtcggcttttctctaatacgggttcacgaaggctttgaatacctgcttcgaggtgtagcaaaccattaggtaaaatagcgagttcttctttcaattcttcggagagaagtgccgggtgaatttccaaatggaaacagatgtccggggcatattcacggaagaggtgaagaagttctttggctcgcttattattatagttgaaagtgcggtcgagtacacgcacatttttgatgccatgctgatggataacattcagtcgttcgcggattgcctccaatgaaatggtgcgaaccggtttctcacctccgctgacgcagaaagcgcatgtgttgaagcatcctcgggtagtttccagttgtacgaaaggcttgctccaattaaaaaaacgacttttctccggtgagacgagctgagagaagttcatgacacgggcaataccgttgtcttgatattggtctgattcgtccagataacataatccggatatctgattccactcatttacagggtgattccatacttttaaccaaattgggaatacttcttctccttctccccgaaacactccgttgacaaatttgttctttcttaagaaggcttcgttatttcctaaaaactccggaccgccgagtacgatgcagcaatgaggtagcaaagctttagcacgtgaaacgatatgcaacagttgctcgtgattaaatagccagttggtagcagcaataatatctggttgatggtgatagatttggttgactaccattccggtattttcgttgatggttgccgatactgtacaccactcaatggtagtgtcatctgctatttgagcatgtaatgcaggcaatgccagcgatgagtgcgcataggagctatttaaatcaagccaaagaagtttcatgtgtaaattttactattagtgggacaaaggtacaaaaaacttgcatcttaaggcatatagtaaaataaaaacgctaattttgcaataataaacgcaataaactagaaaattatgaagaatttgaaaaaatacgtaggtgttctcatgttgctgactttattggtcggctttacttcgtgcgaagatgatgaaactatatttgatcacatagtagggcgtacatgggttggtgatttaggattttgggtagataatagtccggtggaaagtggaataacctttaagagtaatggttttggtgtagatgaacaatggtattatgattgggatagagtagctgctgttttagatgtccgctggtggattgaagatggagatttattcttggattatggtaatggctatcctttattaatattagcagatgtttatgttgaaggccgatatcttacagggcgtttgtattcaaataatatagatcaaggaaccgttactttagaaatgagtaattagtgaagatctaaaaaagaattgtggaattggaaaaaatatcgattttttataaaagttccccttattgaaggctaatctatgtacagagttgtcagcaaataaggggaatttttattattttatttcttcaggaacaacttcttaaactctcccggataaggtgtctcaaactccattaaatctcccgtcaccggatgatagaaacaaagtttgaaggcgtggagtgccagtcttccgatcgggttaagcgattcttcgcctccatatcttccgtcacctataataggatgtcctaaatcctgcatatgtacacgaatctgattcttacgtcctgtttccagatcaagttctaacagtgaataaccgttagcacgtttgattgtcttgtagtgtgtgatggattttgaaccaccatcatcgtaatcgctggaacttacataaagagttttatccgtcagccaggaaaccacagtgtcataatccttctccattgttccctcaacaacagctacataacggcggtcagtcactatttcatgccagttgtcacgtaatgtccgttgtgttttttcgtcttttgcgaacatcattaatcctgatgtatccctgtccagacgatgtacgataaacacacggtgctgtctgcccgagcgctgtacatattcattcagaatcgtataagcggtgcgctctttttgtcgctcggtattgacagataagagtccttgcattttttccactacaatgatataagcgtcctcatatacaattttcagcagtctgttatgaaattccttctttcctttttccttgctgatttgtactttcattccgggttgcagcgggaagttgaactgagtggtgattacgttatctaccaataccacccgtttgctcagtaatgacttcagtttcgtgcggcttgcgtccggcattttggcagccagaaactccattagttccatgggctctttgactgcatagttcgtatattgggcacgtgctttttctgcaggagttcttctcggtcttttttccatttcttttttcttttgcgaacaattcaactaacgtattatcgaagctccagcaacactacattttccacatgatgcgtatgcgggaacatatctacaggttgcacagctttcactttatatttgccgtcaagcagttgtaagtcgcgtgcctgcgtagccgggttgcagcttacatacacaatccgcttcggttcggcaaacagaataacatcaaccacatcctgatgcatacctgcacgtggagggtcggtgataatcacatccggacgtccatgctgattgataaattcctgagtcagcatatctttcatatctccggcatagaacaaggcattcttaatctcattaatctcggcatttacctttgcgtcttcgatagcttccggtacatactcgataccaatcacctgacgagcctggcgggatacaaaattggcaatggttcccgttccggtatataggtcgtataccagttcctttccggtcagcccggcaaattcgcgggctatcttatataaattgtatgcctgttcggaattggtctgatagaatgatttcggaccgactttgaaacgcagtccttccatttcttcaaacatatggtcttttcccttgaatacatgtacatccagatcattgatcgtatcgttgcacttattattaataatgtataggagagaagtgatttcggggaatgaatcggcaatgaactgcagcagttgcttgaatagttccatttcatggtcttctgtaatcttgcagatgacaatgaccatcagctctcctgttgatgaagtgcggataatcatattccgtaacataccttcctgagtacgcagattgatgaaggagtaatcatgctcgtaagcataatcgcgtacagcattacgaatacgattggagatgtcgtcctgtaaccagcatttttcaatagccagcactttgtcgaaagctccgggaatatgaaaacctacagcattcatctgatcatacttcacatcctgccgaacttcatcgttcgtgagccagcgtttgttcgaaaaagtgaactccagtttattccggtagaactctgttttggcagaacccagaatcggtgaaatttccggaagttcgatctttccgatgcgtctcagattgtcttctacttgtttctgcttatacctgatttgttccgaataggggagtacctgccatttacaaccgccgcatacgccgtagtgttggcagaaaggaacggcacgtacgggcgacagctcgtggaatttcacagcttcggcttcggcgtatttgttctttttgcgcttgatctgcaggtctacaacatcacctggcactacataaggaacaaaaatcaccaggtcgtttacttttgcgatggcttttccttcggcagccacatccgttattgttaccttctccagcaggggaagttcttttctctttcttgccacttttacaccaatctaataattatgatgcaaaagtaggtattttttttggaaaactttcgtgtctatgaaaatattccagattgtaatgtcgaaattgcattttaatagaaagttttttctcaaaaagttttctggtttgcgaaatatacttagatttgcgaacagaaaaaaatcataatgtaactttaaacacaatattatggataaaaaaagagtttatacctttggaaatggtcaggcagaaggaaaggccgacatgaagaatttgttaggtggtaaaggtgccaatcttgccgagatgaatttaattggaattcccgttcctcccggatttacaataactacagaagtttgcacggagtataatacgttgggacgtgataaagtggttgagttgctgaaagatgaagtagtaaaggccattgcccgtgtagaagaattgatgaaatctaaattcggtgatatcgaaaatccattgttggtttctgtacgttcaggtgcccgtgcgtctatgccgggtatgatggatactattctgaatctgggtctgaatgacgaggtggtggaaggtatcatccgcaagactggtaatgcccgttttgcatgggactcttatcgtcgttttgtacagatgtacggtgacgttgttctgggcatgaagccgacgaacaaggaagatatcgatccgttcgaagcaatcattgaagaagtaaaagaatcaaaaggagtaaagcttgataacgaactggaagtagcagacctgcaagagcttgtgaagaagttcaaggccgctgtgaaagaacagaccggaaaagatttcccgacttgtgcttacgaacaactttggggagctatctgtgccgtatttgattcatggatgaacgaacgtgctatcctttatcgtaagatggaaggtatacctgatgaatggggaacagctgtaaacgtacaggctatggtattcggtaatatgggtgacacttctgcaacaggagtttgcttctctcgtgatgccggtacaggtgaagaccttttcaacggtgaatacctgatcaacgcacaaggtgaagatgtggtagccggtatccgtactccacaacagattacgaaggttggttctcagcgctgggctgtactggcaggtgtgactgaagacattcgtgctgcaaaattcccttcaatggaagaagctatgccggaaatctataaggaactggatgcattgcagactaaattggagaaccactataaagatatgcaagacatggaattcaccgtgcaggaaggtaagttatggttcctgcagactcgtaacggtaaacgtaccggtgcggctatggtgaaaatcgcaatggacttgctccgtcagggcatgattgatgaaaagactgctttgatgcgtgtagaacctaacaaactggatgaacttcttcacccggtattcgataaatctgctttgaaacaggcgaaagtgctgactcgcggtcttccggcttctccgggtgctgcaaccggtcagattgtattcttcgctgatgatgccgccgaatggcatgctgccggaaagaaagtggtaatggtacgtatcgagacttctccggaagacttggccggtatggcagttgccgaaggtatcctgacagctcgtggtggtatgacttctcatgctgctgtggtagctcgtggtatgggtaaatgttgtgtatccggtgcaggagcattgaatatcgactataagactcgtacagtagaaattgacggcattgttttgaaagaaggcgattatatttctttgaacggtagtacaggcgaagtatataatggtaaggtagaaactcaggctgccgaactttccggagactttgccgatttgatgaaactctcggataaatatacccgtctgcaagtacgtaccaatgcggatactcctcacgatgcagaagtagcacgcaactttggtgcagtaggtatcggtctttgccgtacggaacatatgttcttcgaaggtgaaaagatcaaggcgatgcgtgaaatgattctggcagaaaatgcagaaggacgtcgtaaagcactcgctaagattcttccgtatcagcaagccgactttaagggtatctttaaagcaatggtcggttgtccggtgactgttcgtctgctcgatcctcctttgcatgagtttgttcctcatgatacgaagggacagcaggaaatggctgatacgatgggtgtaagcctgcaatatatccagcaacgtgtagaatcgctgtgtgaacacaatccgatgttgggtcaccgcggttgccgtttgggaaatacatatcctgaaataactcagatgcagacacgtgctatcttgggtgctgctcttgaactgaagaaagaaggagtagagacacatcctgaaatcatggttccgttgaccggtattttatatgaattcaaggaacaagagaaggtgattcgtgaagaggctgccaagttgtttgaagaagtgggcgacagcattgatttcaaagtaggtactatgattgaaattcctcgtgcagctctgactgctgaccgtattgcttcatctgctgaattcttctcattcggaacgaatgacttgactcagatgaccttcggatattctcgtgacgatatcgcttccttccttccggtttatctggaaaagaagattctgaaagtagacccgttccaggtgctcgatcagaatggtgtaggtcagttggtacgtatggctacagaaaagggccgtgctatccgtccggatttgaaatgcggtatctgtggcgaacatggtggtgaaccgtcttcagtgaagttctgccatagagtaggtttgaattacgttagttgctctccgttccgggtacctatcgcaagattagcagcggcgcaggcagcaattgaaggatagaaagataaactggttagaaagttaactttctgataattgggctgtaatcgtctcgtgagagaatgattacagccttttttgttggatgatgttatttttaattgtatttgttcagccctgataatcagccattaataatgatttgtttggtgattattataaaaaactaactaaatatttgtttaagatgaagaagtagcttaattttgcccccgaaaacaaaacatgtttttattttataacttaaaaagaaagaagatgaaaaagggtttattattggtagttgtaatgttagcaactatcgctgtaaaagcacaggacatttacgtaggcggatcattgaacgtatggcgtaacagcacaggcaacactacttcttttaaagttgctccggaaatcggctacaattttaatgaaacatgggcattgggtgctgaactgaactattcacacgaatatgtgaaacaagtgactgcaaattcagttactgttgctccgtacatccgttggtcttactatcagaatgatgctgtacgtctgttcctggacggaactgctgctattggtttcgtgaaaatcaaagatggtgataccactaaagcaggtcagatcggtttgagaccgggtatcgctgttaaactgaacgatcatttctcttttatcgccaagtatggtttcttgggatatcgtaagaatgtgaacacttccggagattctttcggtctgatgttgactagcgaagatttgtctattggtttccactacaatttctaatcgggtagtagataataaaaaataggaaaggggattctctgaaatagggaattccctttctttgtgtgtaatctctatattttacacgtttgttaacgaaaaagttgtttgatatatatatcaatcatatatttgcattgttaattaaacagatgatttaactatagtattaattaaaactttagaattatgaaaaagagtgctttatttattttatttgcgctgatttcagttgctggcttttcacagattacaggttggaatgctaaggtaggaatgaacattagtaattatacaggtgatgctgatttgaatgcaaagattggctttaaacttggaggtggttttgaatatgcttttgataatacttggtcattacagccatcattgtttttgtcgactaaaggagcaaaaaaggatggtaatagcataaatgcaatgtatttggaattaccagttatggctgctgctcgttttaatgttgcggataatacaaatattgtggttaatgctggtccttatttggcatgtggtattgctggtaaaaccaaaattgatttggggaatgatacggaacgtaagtatgatacatttggtgatgatgctttaaaacgttttgatgccggtcttggtgttggagtagctttggaattaggtaaggttattgtaggattggatggtcaatttggtttagtagatgtagaaaaaataggtaatcctaaaaatacaaacttttctattgtattaggatataaattctgataagaaaattactaaaaagtaaaccgctgtaaaagattacttacagcggtttctttatttatgattgtatataatattcgaatcgatatttcttagtccgccaatttctttaactttttgaaatgctcgatcacagccagataattctgatccagacaggcatcaaatttattccagagatcccccagtacaacagcccctccaaatccgaaatcttttatttctagtagattatcttcattaatacctccaagtgccattacttttgagtcaatgatcttagctttctgtgcctcacgaagttcttctgccgtataagtagaatagtaattaaccttcgaaatactatcgtaaatgggactcatgaaaatgtaatcatagaaatgctttctgttcttcacctcttctacggaatggcaggaacaactgacgtgtccggcatagtcatgcggttcgctcggattgcgtgcattcaggtggatacccatcagattgaactcttctttcagataaaaatgttcgtgtgtcacaatgcggcgatgatatttttccggaatcagcgtcagtaatcgttcggaatacatggccggtgtctcaggttttctgagatgtagaatatccagtccctcctcgaaaagagcggtaatgatcttatcttcttcaacgaagaacgtgggcgtggtaactacaattagtttcatttcctgtgtaaagttgtaaagtttagcaaagttactaattaactatttcagaaaccaacgtttatagtgaaaatttgttagattgcaatgtgcgcaagtcaatagtccatagtttacctgataatacttcgccaaatccacagataatcttcagcacttccgttgcttcgatgcttcctgttaccgcaggagtaatgcccattacacctttgggaggcggaggcattcgcctcatttcttcttcgtccggatataagtcccgataactttttttctcttctccgtaatgaaaaacggatacctgaccttcaaagccgcagattgctccatagacatacactttccccatttcggcacagatgtcattgataagatagcgggtagaaaagttgtcgcagccgtctactactatatcatactgactgataatttcctgtgcgttttcctccgttaaacggattggataagtccggatagttatctcgctgtttagtgcggaaagtcgttcggcggcacatattgccttgggtttacctaattctttctccgaatagagcacttgccgttgcagattactgatgctgactacatcgtcatctaccagtccaatgcagcctactcctgctccggtcagatagagggctatgggagagcctagccctcccacgcctacaataagaacctttgcttgcttcagtttctgctgaccgtcttctccgatttcgggaaggatcatttgcctgtcgtatcgcatcgttttatcttttaaagtcaaaagactggtcccaatccttccagaccggttcacgtcctaatttcctcaggtcacgttccacttctaccgctttccgttcgtcactcacatggaactgctccagtgtttgcgggtagctgtaatatccgcccggttctgtcttgctttcggcactcatggttgtcacgcccagtgttgccatgtgatttcgtatctcggcgctttcacgggtagaataggagatatctacatcatgatcgaagattcgcatggcgaaagtaagctgtgcaagttcccggtcgttcatgataacattgggttggaagccatcgttttcggatggacgcatacgggggaagttgacgctgtatttggtcttccagtagtgtttctgcaggtagcggaggtggtaagccatcattgtcacatctgtccgccattcctccagaccgatcaggacacccatgccgatcttatggacacccgcctgtcccatacgatcgaatccatcgacacgccattcgaatttggacttcatgcctcgcgggtgatactttttatagttcgccttattataagtttcctgaaagcagatgactccgttcagcccgtgatgggtgagttctttgtattcttccgctttgaggggcatcacttcaatctgaaggttactgaaataaggttttgccagatcgagagcacgggcgatgtaaggtacacctgctgctgccggattttcacctgtcacgagtaaaagattctcaaaaggagccagccgtttgattgctttgtattcgttgatgatttcctcctccgtcagaatcgttcttttcatcggattactgatatggaaaccgcaatagacgcaggagttggtgcatgaattggtgatatagagcggcacaaacatagagattgttttgccgaaccgctccatcgtatatttctggctgaggcgggccatcacttccagatagggagtggcggcaggtgagatcaatgccataaaatcgttgacatccagatgctcttttttgcctaatgcacggcgcacatcggcatctgatttggaatagatggcttttgtcgtctcttcccaggatattttttctaattcgtctgagaacattttaattaattgaaagttgaaaattaaaaagaaatgaggttgtgacttggtttggggatattcacaactcattatttatcactcttggcatttttcttcagatcacgggataatctcatggcgcagaaatttggtccgcacatcgtgcagtattctccgtcaatgtgatgtcccgcgcggaaatatccttgtgcccgttccggatcgagagacaagtcgaactgatctttccagcggaactcgtaacgggctttgctcaaggcattgtcgcgtacctgtgctcccggatgccctttggcaaggtcggcagcatgagcggcaatcttataagtgataacccctacacgtacgtcttctttatccggcagggcaagatgctctttcggagtgacataacaaagcatagctgtacctaaccagccgatttgagcagctccgatggcagaggtaatgtgatcgtagccaggagcgatatccgtcactaaagggccgagtgtataaaatggcgcatcatggcatttctcgatctgacgttccatgttctccttgattttatgcatcggtacgtgtcccggaccttcgataaatgcctgcacgttcttttcccatgcacgaagtaccagttctcccatcgtgtccagttctgcaaactgtgcttcgtcgttggcatcatggatagagcccggacgcagtccgtctcccaatgatacggcaacgtcgtattgagccagaatatcacagatatcgtcaaagtgttcatacaggaaactttcctgatcgtgcaccagacaccatttgctcatgatgcttcctccacggctgacaatgccgcacagacgtttatcggcaagatgaacattatgacggcggatacctgcatgaatcgtaaaataatctactccctgttcgcattgttcgatcagtgtgtcccgatagatttcccagttaaggtcttccactacaccattcactttctcaagtgcctgatagataggtacagtgcctaccggtacagggcagttgcggatgatccattcacgtgtctcatgaatattttctcctgttgaaaggtccatcagcgtatcacctccccatttgcagctccataaagccttttccacttcctcgtcaatgctggaagtggtggcggagtttccgatattcgtattgattttcactaggaagttacggccgataatcatcggttcggcttccggatgattgatgttggcaggcagcactgcacgtccttctgctatttctttacggacaaattcgggagtaatgtgagtctcgattcccagttcctcacagttcatattttcgcggatcgccacatattccatttccggagtgatgattcctcgtttggcgtatgctatctgagtgatggcttctccctttttggcacgatagggaagggcaatgtgttcaaagcggagatgatccagacttttgtcatcacgtctcatttgtccgtattccgaagtgatttcggggagttgctctacgtcaccgcgtcccacaatccattcttcacgtaagcggggaagtcctttcttgagatcaatgctcattgacgggtcactgaacggaccgctggtgtcatatacgtatacttccggattcggagtagctatcttttcttctccttcgaagctgacactgggcacttgttcaactttccgcatggctacacggatgttcggatagagtttacccggcagatacactttctgagaacgggaaaattttattttttgttccatagaattttattatcgtattattaagaatagtgaaacaaacactactccctacttattacctattacttatcacctattacttattccaaaaatgcagttaaaggtgaacttgcttctgctataaagttatcagcctgcagacccagtcctgcttcgtatgcccgtcttccggcttcggtggcggctttgaaggccaacgccatttctaccggattgcctgctacggcgatggcggtatttaccagtacggcagaagctcccagttccattgcttcggcagcgtggctcggtgcaccgattccggcatctacgacaacggggataccggcctgttcgataataatctgcaggaattctttggtttgcagtcctttgttagttccgatgggagcacccagcggcattacggtagcggcaccggcttcttccagtcgtttgcagagcacagggtcggcctggcaatagggtaatacgatgaagcccagtttgacaagctgttctgtagccttcagggtttcgatagagtcggggagcagatagcgcggatccggatggatttccagtttcagccagttggtaccaaaagcttcacgtgccatctgtgcggcgaaaacagcttcttccgcatcgcgtactcccgatgtgttgggtagcaactggatattcggatgaataatatgtttcagcatgtcgtcttctttgtcatccatgtcgatgcgcttcattgctacggttaccatttcagtgcccgatgtcagaatggcttgttccattacttcattggaattgaattttcctgtacccagaaaaaggcgggagtcgaactcacggcctgcaattactaacttttccacttttcaattattttatttgattatacatttcatgttcaaaatctttcgtgtttccgctgccggatcctccgcccgaagaatcgttccggaaagtgctattccgttcactccggtttcgagtatggcgggtatatcctcacaggtgattcctccgatggctactaccggcagttcgatattcgcttctttcatctgagataaaatagcggcataaccttccagtcccagaacaggactcaggtttttctttgtagtggtaaaccggaaaggaccgatgccgaggtaatccgctccggcacggtagtgctgtacgacatcttcgaatgtatttgccgtacctccgataataaatgcttctccaagtaattgtcgtgcctgatctatcggcatgtcttttttgcccagatgcactccgtccacttccagctttttggcaagttcgacgtgatcatccagaagtaagatcgcttctttttctttgcagagaggctttagttggagggcaacagcttccacctcttcatacggagcttccttcatgcgtagctgaatccatttacatcctccttcaagtgccatgagtgccgattcgaaataagtataccgatcggtctggtgggtgataaattgtagactgaccatacttttaccctccacaagccgctttgatgaccacgaggttatcattctcctgtaacgcgaatttctcccattcggaacgtggaatcattttgttgtttacggcaatagcgatgccttgtgccggaagttccagttgggcagccagttgtgtaagggtagaagcaggagtcatttccacctctttgttgttaacttgtactttcattgtcctatcagtattaataagttgaaagtaaatacaaagagcgtgcttatatagaaaggcgataagaaagaaacacaatccctacgtcagtgctaactgcctcaggttcctagggtataatctcagcccctctttggggcacccctttgtctttacgggagcaaagtaagcgaaaaagaaacaaagattcatcaaattatccggttttttttcatttttcttccgattcccgttttttgataggatgagaaaagacaaaccgtgctccgttcttataattcttgtcaatccagatatcgcctcccatgcgttgtatggtcagtttgcagattgccagtcccaagcctgttccctgcacaaattcgttgagcttctcaaaacgctggaataccagttcctgcttgtcttcggggatgcccgagcctgtatcggtcacagagaacagcatacactggtcttcttcatctatttcataattcagcgtgatacttccgccgtcgggagtaaacttcaacgcattgttcagtaagttgatgataacctgctgcaaacgtagcggatcggtatagagcatataaggctctttcggcatctgaagcctgacatctatatctcttgtccggttctttctggtcagtgtgatcatgttctggcaatgatttaccagttcgcaccattcatacttgaacagcagtttgcctgattccagacgtgatacatccagtacatcactgatcagttgcaataacaattcggaattagtctggatgatatccgcatattccttctgctcgtccgttgtttccacggtatcgatcagcaggctggaaaagccgacaatggcgttcagcggtgtccgtatttcgtggctcatatttgatacgaaggcacttttcagttgattggcttcttcggcacgctctttggcatgacgtagtgcaatttccgataattccagtttctttttatcttcccttagttgggctgtagtcttctcaaggtgattctttaagatttttgtccggtaataataatacagtgagataaacagtccgcctatcagtacaaggaaggtaaacaggatgaattgcacttccgtccgatatgcctgaaagaaaggcacctgttggttgatgataagtgaattgaaaggtagtttcttgtcctgaaatccccattcatgcagtttgttggcatcaaatttgtatctgttgggcaacaaatgaatgtggccgacattgtttttccccttgtccagaaattgataagcctgttctcccatgcttctccctattccgtcgtattgggggatatatcctccgattgcccaataaccgatggcggtagcagtcaggctgaaaacaggcaactctggattcgctttggagaaagcatatacagagttgttcatatacgttatgccccgattgtcaattctccagatacccagtagtgcaaccgaatttttggggacatcgcgtagttgtttggcggcagcatcaagggtgtggatacggccgtcaatataggtcgtcgatatttccggatagcgtttcatattcttttttacccacgcttgttcggcaagtccgttgtaggtgttgtccgagatgaacactaaatgctccatatccggataaaagcttcgcatcatttctatgtccttatcgatatcatattcatatgtgttacagtatattatattgtatttgttcattctttccgttaagtcgatactctgaggttcataagtccgtatatcaatagagtcttccggaatacggatgccgttgcgcgatgccatagcgcaaaatacgggcagttgtctgtacttctcgtcttcgaggtgcaggaaactgctccacgcttcgccacccagcaggataaccagcttggcgttcggatgtttgtccagaatgttggtaagtctttttttccattttctggattgattgaggtcggtaacattcatgttttctacgatggtggaatacttgccacccagttggcggtacgtttctacgaacgtgttgatattatcgtaggtatatttagtatcggaattataggacgtcacgaaaagaatctcctcttccggttcttccggaatagccgcattgcctgtaaaggagaataaaagaaaggaaataacgtagacaatgcgccattttttattttttagctgaagtgtcataattgtctgttttgattttcggctattgcaaaaatacaaattatgcctttgaaatacaatagatagtttagttttttatgctagaaaaaaggccgctgtgaaattcacaacgaccttttcaatagtatagtttagcttaattttaatgagtccggttacattcgtttttctaccacatcccagtcgatgatgttccacagggcgtttacgtggtcggcgcggcggttctggtagtccaggtagtaggagtgttcccacacatcaaaacccagaagtggtttcagtccggcgcgtacagggttactgccgtttccttctttggtgatatgcagtttaccgttcttgtctactgacagccaggcccatcctgaaccgaacaatccgactgctgctgcattgaattctttcttgaagttttcaaagctgccgaaatcacgtttgatggcttctcccagtttgcctgccggttcctttttcgaaggtttcggagcgaattggaggaaatataaattgtgattcagcacttggccggcgttgttgaagatagctccatcgggagcggtggcaacgatttcttctaccgttttgccttcatattctgttccgggcacaaggctattcagattatttacatatgtttgcagatgttttccgtaatggaaatctatcgtttgctgactgattacaggttccagcgcattgtttgcgtaaggaagtttaggcatttcgtaagtcatggtcataattattaaagacattaatatagtattcatattgtcaaaactttaaatggttttgttatactataataacagccatagttcgcaaaaggttcacggtattttatttttatttataaatgtactgtatacgttccacttgctgcgggttgtcatagctggtgcggcatatccattgtcccgtattgtcatattcgtaataggagtcaccgtcgatccggtttccgtactcgtcgtacaggcaggtcaggcagccggacgtcttctggctgttgccgaagatacgttggtagacgatgcgggtgaggtatccgtatttatcatattcatacagttctttttgcgagagaatctggttgggcgaattgacaaagagcatattctgatgctgagattcggtcattctgcctttgtcatcatatttgttgactgtatatccctccatttccccgttcttgttgtactctttggtttccgtcagtaatccctgcttgttgtagctgctgacggtatatctgccgtccatgtattttagagaatcgctttcgatgctaccgtcgataccgatgcggcgtgcacggcggtaaaagtccgttttggttttcggattagttttcacttcgaagatgcagtggccttgcgggtcgtacagcctgctggtttgcacctcgttgatgggttgcccgttcttttcagtcacggataatgtggtggtaagctgccccttgtcattgtaggtgtagctggtcgtaatattgccggtgctgtcggtttcacagcactttatcaatcgtccttgagtgtaatatttcacggtagtcggggtggaaacaatggcttgcaggataaatggagcacgcaaattttttgcctggtcacgaaattccttatacttgtgtgttttgaggaattcctgcaataaaccgagcgattcggagttgactattgccggtttcagaagctcgaagtctgccttttcactgagatattcaagatcgttcaggtgagtccgtgcaccggtggccagataaggtgtattcttataatcatcgatgatctgccggatggcggtggcatttccttcttttttcaggctgtcgatacgttggaaaaggaaatcatcatataaggtacggacctcggcaagataggggcgcggacctctgtcttgataatacttctgcatttcggggtcttcaaagaaggctttgaagtttgcaggagtcggggtggtcttcactagttggtagagccgtacgttttcggaggcgttgacttgtgcgataaattttccgttgggatactccttgacgtaagtctggtagatgatgggagtgggggctttgagcattccttccagcagcgccacctcgcggatgttctgcagccgttgcagcatggcggagtcaaccggatattcggtggcgtgaatgctgtccagcagtgcccggctgaaaggaattttatctttcgaggcctccagcaggttgataatggactggtccgccttgtcccgtatctgagaaagcggaatcttttccccttcacagatactggggaagttattttgggcggctttctcgtagcagccgaaatagagggtggctgcctgttcgctctgtccgttccacaggtcgttgaggacgtccatcaatgataaatcttcggcatagtacgcctttgtttcgtcatccagtttttccctgttcttctgccatttgtcggcgtcattgtcgttcagatacctcagcagcttttccatgcggctttgcttttgtgccattgcttgctgtggtatgcaggcgacaaggcacaaacataaaataaatgataaaaatatactctttttcattgctttgagtgattaggttaaatagttagtgatgaaaattcataaaaatatcttcattgtcaaatgaatgttatacttttgtcgtattgaaacaaatttgaacgccaagggtttgttaaaaatcctcattgtttttataatgctgttatgaataccaactatatagaggaattaaatgagagtcagtgtgcagcagtgacttataacgacgggccttcgctggtgatagccggtgcaggttcgggaaagacacgtgtgttgacttataaaattgcctatctgctggaaaacggctatcaaccgtggaacatcctcgcactgacctttaccaataaggcggcgcgtgagatgaaagatcgtatagcccgtcaggtgggcatggagcgggcacgttatttgtggatgggtaccttccattctgtcttttcccgtattctccgtgccgaagcaaagtatatcggattcacttcccaatttactatttatgattcggcggatagtaaaagtctgatccgttccatcatcaaggagatgggactggacgaaaagacatataagccggggatggtgcaggcccgcatttcgagtgccaaaaaccatttggtttctcctacgggatatgccgccaacaaagaagcgtatgaaggagatatggcagccaaagtgcccgctgtccgtgaaatatatacccgttactgggaaagatgccgtcaggcgggagctatggatttcgatgatctgctggtgtatacgtatattctgttccgcgactttccggaagtgctggcccgttatagggagcagttccgttatgtgctggtggacgagtatcaggatacgaattatgcccagcatagcatcgtactccagttgacgaaagaaaatcagcgtgtttgtgtggtaggcgatgatgcgcagagtatttactctttccgtggagcggatattgataatatcctttatttcacgaaggtttatcctaacacgaaagtctttaaactggagcagaattatcgttctacgcaaaccattgtctgtgctgccaacagtctgatcgaaaagaatgaacgtcagattcggaaagaagtattctctgaaaaagaacggggcgaaccgattggcgtgtttcaggcttacagtgatgtggaagaaggggatatcgtagccaataagatagctgaactgcgtcgggaacatagttacggctatgctgattttgccatattataccgtacgaatgcgcagagccgtgttttcgaggaggctcttcggaaacggagtatgccctataaaatctatggcggactttcattctaccagcgtaaggagattaaggacgtcattgcttacttccgcttggtagtgaacccgaatgatgaagaagcattcaagcgaatcattaattatcctgcccgtggcatcggtgatacgacagttggaaaaatcatctccgctgccactgaaaatggtgtcagtctttgggcggcgctttgcgaaccattgagctacgggctgaacattaataaaggtacgcacaccaaactgcaaggtttccgtgaactgatagaaggctttatgaccgatcaggtggacaagagtgcgtatgagataggaacggatattatccgccggtccggcatcatcaatgatgtctgtcaggatacttcgccggagaatctgagtcgtaaggaaaacattgaggaattggtgaatggtatgaatgatttctgcgcgttgcggcaggaagaaggcaacccgaatatttctctgacagatttcctttcggagattgccttgcttactgatcaggactcggacaaagcggatgatggagaaaagataacgttgatgaccgttcattcggccaaggggctggagttcaaaaacgtattcgtagtggggctggaagaaaaccttttccctagtggtatggtgggcgattctccgcgtgctctggaagaggagcgccgtttgttctacgtggccattacccgtgccgaagaacattgttatatttcttttgccaagacccgtttccgttatggaaagatggagtttggaagtcccagccgtttcttgcgcgatatcgatgtgaattatttgcggttgccgcatgaggcgggagtcagccggtcggtagacgaaggtgcggggcgtttccgcagggagatcgaaggtggatttacacgtgcggcatctcctacacgaacgccttatggtactaaattttctgatcgtgaacgtccgaaggctcaggtgattgcgcccactgtgccgaagaatttgaagaaggtcagtgcggtgagtggaagcagtatacggtcggcttcagccggctcggcatctgtaacaggagtacaggcggggcagatgatagaacacgaacgtttcggcttgggcgaagtgatcagggtagaaggaacgggtgataatgcaaaagcaacgattcattttaaaaatgcaggggacaagcaactattgttgcgttttgcacgttttaaagtgatagagtaatcatagtaaaattagagatgatcatgaggaaacaactaactgtaattctgctttctgctctgatattgagcggatgtgcatcgggacgtatgggaaatcccggagcaattgtaggtggtgctgcaattgggggaagtctgggaagttcgataggcggacttatcggagataataatcgtggctggaggggcggatatcgcggctctgccattggaaatattgttggcaccattgccggtgcagcgatagggaatgcgctgactgctccgaaaccggacccgatagaggaatatgcttacgttccggaagtcagacaagggcagtctcactctaagtttaaacctcggacacagactcagcagcaactgactcagttgaaactgcgcaagattcgctttattgacgataaccgtaatcatgcgatagacgggggagaaagcagcaagatcatctttgaaatcatgaatgaaggacggaatccggtttatgacgtggttcctattgtagagacggtcgggaaagtgaaacatatcggcatttctcctactgtaatgatagaagaaattcttccgggtgagggtatccgctatacggctacagtctatgccggaagtaagctgaaagatggtgaagtgactttccgcgtagcggtgtccgatgagaatggggtaatctgtgattctcaggagtttacgctgcctacacagcgggcggactaggacaagaatagctcaaaatattcgatttgttatagtgacagtatgtgctcgggatagtgacactatccttggcacatactgtcactatgttaatgggatggtgacactatcccaatacaatagtccggtgcagtcattacacaataaaatgaagtatcggtttcatctacacagaagcattctatatgagtatctggcaaaattttacgtatcggttttccttcccagtcgaaaacccaaatctcgctgtttagagtttctttttgttcttcgtgcatccgattggtgtttgggttatacagtacataaacatagttattggaaacggcaatgcctcgtgctcccagttcggcatcaggattatcactttccgcatacacaccgtctgggcttgaattgaactgataatgatagggtgctaacaatagtcttttatggagcgttaatgtttccggcttatagtcccatagctcaagtacattattggtagcacatgccagacgtttccggtcggtgttgtaaccgaattgtgattgatgaaacatacctttagccgtattgggtatgttttcttctccactttgatagttcgggaagtcgccgcatttggatataacattgccgtcattatctaaaataaggaatctgcaatcttcaaaaacaccggacgctataaagcgtgattcgcttatcggatagactctgtcaatgctcatgggcaggtgtatcaactctccttgtcgctggatggaaaagtctttcgtgttgaatatatagttttgcgctgtgaagtgccatcgattgtgtatgaaggcagacgaatcagacagaaagaattcgacagggcttaaaaattcatcaggtccttgtccttgtggcagcatttgatttacaaagcgttgttcactaagactatagcagtataaaaggctgtctcctttaaaatcaccggcatataagatatctcctttcttttttatatccattggaatggagataaaggcttccttcaaagcggtagatttagcagttgtgctttcgctaaaggatactcttttttgtgattcactacaactgaacaatggcaatgccaaagtaaacaatagaatgatgtttttagatttcattttgttttgctttattttgtactataactacaaagataacgtatgtgttttgaaaaacaaggatattgaagagaaatagggctaaaatatttatagtgagaacataataatataattggcattcggtaattaccatatattgtgttaactttgtgatttatttgatggtaattgtagttgcgtttttgctaaagggtatatttattgccataaatagtattgatccacataccaaagaacttgtcggtaaccgaatatactttattgatttctgtaataatgtctttttcaagcagttttttagttgcggactgtacagaacttgcggatgtcagactgtatcgtttgataaatttcgctgatgtgacgttttctgcttcacctactttggcaatggcataaagcaattccttctgcttttcgggaatattagataagatttcccgaaagattgtatcattatatgcaataaggttatctatagctgttttgataatttccagtgtacattctttccctttcggtgtatctgcaaaagcttcattgaatgttttttgaatataaaaggtatgtcctttgaatagccgatatactttttctatattttcgatttcaatatgccgttttcttttttggaaatggtctgcgataaatggtatatagatttccggtacaatggctttcagttccaaaatatcggcactgtggtagaatggacgggatgaagatagaaacatttcctgcatcatatgccgttcacttccggcaaagatgaagttactgttttctattgtctgtatgtgtgtgcgtagtaatgcttctatattcttctcgggatatttagcaatttgttgaaactcgtcgatggcaacaatacaaggtttgtctgctgctatcagacattgaaatatttcttccagtgtatattcgggtcgatcaatatctcccagttccagattgaaagtaggtagattggtcagcgggtcaaatccgaatttaccattgattgatttaactgtctggataaacaggcttgccattttcttactgcggggcaatagtgtttcataaatttctttgccaagcagataagtgaattctcttaagcttgatgtatggagtatgtcaatgaagaaagtataatattcttcttttatttcaggtttctcataacagaaacggattagtcccgttttacccattcttctgggtgagataatgacaaggttattgccattggttaatgatttaaccagcctctctgattctttcacgcgatcgcagaagtactcgggttctatttttccagttactataaatgggttaatttctttagtcatacctgtttcaattttccgtaaaggtagttatttgaatagaattatgcaaatcgaataatgttaataaagtacctagtcttgttttattcttatcggatattgaatattgttaacaaacttattctttttgcctttttatggtccgtttctttaaaaccaaaggcccgttggttttaaagaaacggggtcttggttttaaaggaacgcccttttggttttaaaggaaaaatgacgatttgtatattgttgataatcaaaggtttgggaaattctgttttcactcttgttaaatagtaaaatatttatataagtatagcttaataaataagagttttaatgctacaatatttatattatgaatatttgtttgactacaaagtggcttttcttctattgaactatatcttttttagatgagaaaccttaaatcgttgcgaaatatgttatctttgtagtgcaaaacaacataaagtaaaacaaaatgagacctaaaagcataattctgttatctgttattgcttctgtcgaaggaattatatatgatataaaatgatgattatgaaaaacaaaatattattaatgataattattgtcctctttataggaggatatggtgtattcttttctctagttaatgcgaagcctatttccgatttagcattaacttatgaattaggaaattgtgacaaagattctccaggtaactgttgtcttaatagtagaattggtgaagtgagaaatattatatcaaattagtgatgattggtagaaataatagttcgttgataggattggtacatgtgggaagagttattatgataatttttctaactatgtcatcctgtcaacgacaggtttcatgtcataaagatggcattgaaatcattgatattttgaataaagattgtcctatacaaatcgacttgtatgacattgtagatagtatcaaatatattcctttggaaacaagtgaatgcttgttgagtgatattgaatgtataaagaatgatggaaatttttactttgtaaaagattctagaggattatttgtttttgatgaagaaggacattttattaatgaaataagtcatagaggaatagggcctgatgaatatgtttattcggataatttctatttagatcgtgataataagttagtatgtcttatctgtaattcagcgagaaagattttgcagtatagctatattggaacttactctaatacaattcaattaaatgccaaagatgctaacattgaatctgctatgatgtgtggtgaaggagagcttattgcgtattatccgttatccaatgattattctctaagcaaaagtgaatacagtacatttagaatcaagaataacttattaattggcgaaacattattaaaagcaaaaaaaatggcaacccaaaatgtacattattcttttttgcattatccaatagcgttattagatgatcaatatttctttatatcagttttatcgaatgagctttttgtatatgaggaggggaaaattatgtctagatattatctaaatatgccggaaaatgagccaagtgagagttttatagaagaacataaagacttgggcttttttgaattgattgaaacattgaaaaaaaataatataggttggggaatcactgctattgaatcttcttcagattatttatttatgtcaattagtaataaaagtacggtgatttgggataaaaaaagatcaattcaaatatctagtatttatgattctaatttgaatctttattcagatttgcttttacctggcggagtatcaaatgagcatttaggcttttattctgctgattttctctgcgctgaaaaagatctaatattggaaggtacagataaatctcttgctaaattggttgaaactttattagaagacgataatcctattgtgtgtcaatattttttttaagaaaaaatgctatagatatattaattgaaaaatatgggatttgattatgactagaggaaaatgctttcagaagctaataaccgtgatttcctattcagaatagaaaatattctattatatgaacttgaataataatttttatagtataaatagaataaagtcgctcataatgttgtatattgaaaaataaccactatctttatacagaatattattcactcaaacaaaattagttaaccctaaaatctagaaagcgcgagaaactattgaaagacacagaaaaacacagcttcttctatattgccgtatttggttatataaccacagtattacctcatcagaatgaaaaactgaaagcgtatcttttctaagcttctaaactttcctgattcaataaaattgaatgatggaaaataggaaatgtgttatattgtcaataggagtcacattggctatctgtggaatgttatgcagtagcttttgggggcgctatagtatgtttgataactattttctacttttccctgtctctttggggatatgtttggtcactataacggccattctttcatttcttacaaagaagaaaatttttcaattatctgtagcggatgtactaatatctattttagtggtttactatatcgttcgatatgattatgaacttcaattagccaattggaaaataatgtatgctattttattattgatattatggtatgcactaaggattctattgatgaatgctacaatatctcgacccattctctttggtggcattgttgctattggttgtatgttgtctatatggggattattgcagctttatggattgcaaccatctaatcacagattatttgccatcactggacctttttataatcctggaccttattccggttatttagctatgatttttcctattaatttaggttgtctgctccagtctatggggaagacacgatatttgtggctagtagctttcgctttgatgctatgcattttgcctgccgggatgagtcgttcggcatggttagctttgtcctttagtagtctgtgggtattggttatacattttaagtggatcactaaggcaaagtcttatttgcagacgcatttctatactgctactttgctttatataactgtagctattattattgtgtgtgcatcagtgttgctttatcagatgaaagctgattcggctaatggccgattatttatatggaagacgacgtgtaaagtaattgcgaataaaccgttgttagggtatggcccgggaactttttctcatgtatatggtgagatgcaatcaacttattttgcatcggaaaaatatacggaacaagaagaaagagtagcaggagcacctgaatatgcttttaatgaattgttacaattatgcgtagagggtggcattattttgctgatgctgtttttgatgctgatagtttgggtagtcggtaaaggaatatctaataaagattatatcgcttgttccggccttatctctttgctacttttttcattatcctcctatccttttcaagttcttccatttctaatgatgggagtattattacttgtagtttgtgtcactaatcctaaagggataatagagaagaatgcctgtattccacgaatatgtactctattgttactaatatctatgttggcaggaaatattttgtgtctttacaaactatgcaatgtaaatgaactttcccaacgtttatattatataaaggtattacaggatcaatctttacaaaaagaggcttcgacaggatatggacggttatatgacttctttaaacataactttaattacctgatgaaatatgcaggaaatttatttgctcaaaaaaggtatgatgaagcgatagtcattttagaacgtgcaaaattagtaagttgccatcctagtatttatactctacaaggacaatgctatcaggctttaggaaactttgctgatgcggagaaatgctataaagcggctgctttattattgccaattcgtatttatccttattatttgttggcaaaactttatgctgaaccagacttttaccatgaaacgaaaatgaaacagatgataaatattgtattgactaaggaacctaaggtatactctaaagcaatacatgaaatgcgcatggaaatgaatattttattaaataatcgaattactaactaattaaaaactaatcaaaatgaaaaagaaaatgatttatgttgttgccgctcttgtactgggtgctgtaactgtgtttaatgtgaagacagtgttggaagcaaatcacgtgtatgatttgacgatgacttccattgatgcgctaagtgagaatagtgatggagaaagtggtgaaagcggaggaagtaccggagatggagaaagtgatacaggtgctaatatcactgacgaaagggaatgtcataataagaatggctattggaatatggcattaatatgtacagattcggggattgagaaactaacttgcgaaagaacaggggaacttacgctttggggatttactgtttttaaagtttcttataagaaaggagaaaaatatgaacttgcatgggaacgttgggcatgtacaactagtacaggaaattgctgcttatctgataaacagggacttagggttagataaccgtatatatgtataataaaataagtactatgaaacagaaagtctatatgataatgctttttttaagtagcattattgtagtatcatgtaatcctgaaaaaaaaacatcaagtgaaacagtccgtaatcttaatccttcagaagaacctctgcaagagacaccgatttacaaacacgtagaaattataaagctggaaacgtctccagtttccctgattagtaatgtaaatcgaatagaaatgaatgattctattatattcgtatcagaatttggaaaattgtatacattcacaagagaaggtaaatttgtatctcaaattagtagaaaaggagaaggaccggaagaatatattgtcttaagctcgttttatatcgacaataaaaaacagcaggtgacaattatagataattataaaaatgtattaatcaattatgatttttatgggaaatatttatccacagtttctgtgccagcagggtcctttcagagttgtcattacacttttttgactgaagacaatcagttattaagtcataatatgatggatatgaatgatacagaagcatattctttattcgatatgcgcaaacaaagagtaaaacagtatttttcgtatcaaccgataactgtaggtaattatatgtatcctttttcttggcatccaatggcgaggagcggcaaagacattgatataattatgcctttatgcgatacaatatacacttattcagcagcaacatcttctttcgaaccgaaatacataatagaaacacctcaaaaaatgattcctaaggagaaaataagaaaaaatacaccttcctatactgaggatatatgtaagttaagcgaacaaggattctttactggatttactggaatttttgaaaccgaagcgaaaattttactagaatataaagatcaaggagttgttatgggatattttttgtttgataaatcgtctaaagcaggacattattatctaactacttggaacgagaagtatacaacattaccttttttcaacactatctatgcatataaaaatgtatttgtaggatatgcacaaccgagagatttattggaactggaaaatcttcaagacgaaaaaattcgtgaaagcattaaagatttggaggaagatgataatccatgtttgattttgtatgaacttaaatagcaatagagatgtggaaatgtggaacatttatattgttaactctgaatatcttattattgatagcattttatataattaataatggatatagtaaaaaagagagtttgttgactgaaaaagtcaataaactcttttatgagaatatatcattgcaagataatataatcttatccaaacaaggatattgtcaattagaccccgaaatgctattatatactaaagacagagatagcatacatttgtctgagatcaaaagaaaagaatatacgcttgttttaagatattccactcaatgttgttctacttgcgtagaggatattttgagaaaaatgagaaaatttgaagaacaatatcctgatattgacatcttattgtttacaacttatcgggtacaaattgaaaaaaaagattttcaacggatttgtagattttttcctaaagtctataatgtgttttcactaggaatacctcttgatgaagaggtagttccctacttgtttgtcttagatagaggtatgagagtaattgatacttttattcctgacaaggatttacctaaattaaccaatcgttattttgaaagaattacgacgactttatcaaggaataaagcatacaactataagtattataaaaaagaaatataatgaaactaatctttacgcttatctttactgcatatagcattgccgctatacctatatctgtaacgaaagggcctgatgggataaaaatacattgtctcaactctgcaaataatcctttgctaggatctcctgcttacaaaaatgtgagaattgttgaactggaaaaagttccttttttccagcggataaataatatccggaaactggaaatgaatgatgattatttatttgtccagacatctgaaaagctatatacctataccttaaacggtgaattaatggctgaaatcggaagaaaaggcgagagggaagatgactatagtgagctaagtacattttatattgataacaagaagaaacaaatcaccattattgatggtgttcaaaacaaattgatcaattataatttttggggaaactatatgtttacagatactatttctgaaggtgctttcaaatggtgctatcaaactttattaattaataataatcaattgttgaattatcatgggatgagcatggataacacagaaccttattctttattcgacctgaccaaaaaagaagtcatcaaacgatacttttcatatcagccgattactttgggcaattatgtgtatcctttttcttggcatccaatgacacgtgcagataaagatattgatgtaattatgccattatgcgatacggtatacacatattcagctgcatcgtcttctttccagccaaagtatattatcgaaatgactcagaaaatggcgcctaaaaataaaatcagaaagaatacgccctcttatagtggagatttattaaagttggatcagcaggggtacttcaccggatttgacggaatttatgagactgatactaaaattttgttacaatatatgtatggtataactttaggatatttcttatttgataaatatactaaaacaggtagtttttatctgtattcacaaaatgataaaggcaaaacattcccttttaatgtaatcgttcattcctataaaaatgaatttgttgcattcggaaaagggaaggagttacgctcattaactcatataaaagacaaaaaggtccgagaaaaaatagaaagtctgggagataattctgcatgcttaattttttatgaacttgaataagaatagaaagcaatgaagcgggcattaaaaaagtttggttgggcattattgggacttttcatattgttccagatttatttttcagtcagagtatactggctggtatcttgtacgattccgacttattcaatgtctcccaccttggttggtggagattacatacttgtttctgtgcaaattcccggacgtagaatatacaagaaagatcctttacggccggaacattatcttattcatcgaaggaaaggagcacatggcgtgaagaagggagacgtggtagtattcaattttccatacgcaaaacagaatgagaaaatgattctgtgtgatgaagtgttttattgtaaacgttgtgtggcacttcctggagagatatatcaatggaggactaatgaaggaacaaaaactgtatatctgcctaaaataaatgatactatacgaattgatactactaactacagtgattactataaatgtattgaatatgaaacgggattacctgtgagagtatctgaagagggcaaggtgtatcttgcaaatactttactggaaagttactgtttccgacacgattactactttatgcggggagataatgtaaatgattcgtatgattcccgctattggggggtattacccgatgattttattttaggagtagggaaatgtatctggttttccagagatcctaagaccaaacagataagatggaatagaatatttaaaacaatataggatgatgatgaaatatataagattaataattccttgtattgtgcttgcttcggtattcgttgcatgttcatcagctgataaacggttggaatatgctctctcttttgccggagataatcggggagagctggaaaaggttttggaacattatggacaggaacctgaaaagttggaagcagcacgtttcctcatccgaaatatgcctcattggtatgcttacgaagggtggcagctggattctgttcgtcaaatgcttgcattgagaaagttggataaggaatcgattaagaaatggaagcaagtttcattttactctttacctaaagtttatgatgcacaggtaattactagtaattatttaatagagaatatagacctggcattcaaggtatggaagaaatatccttggaacagaagtcttgactttgatgatttttgcgaattcatcttgccttaccgcattgataatgaacctttatcatcgtggagaaaactttattatgaacattatactcccattctagactctctttatcatggagaagatgtggtgtatgcttgtcggatggtatgcggagaattgaagaaacgagagttgtattattttacagaacttattataccacacatggatggagaatttctgtatcatcatcgtattggctattgtagagaatcatgtgatataacactgtatgctatgcgcgcttgtggcattccagttgcaactgaattcttcagatattctcccgagtatcagcattatcatacatggaatacattacgggatacaacaggacgtttcattctatttgagcccggaaaaattgatccaacacgagataagataactacggataacagaaagaaggggaaagcatatagatattgttttggtgaacaaaaatcaacggctttactacttaatgtaaaggatataggaatacctaaatttttcaggaattcctatataagagatgtaactgccaattattttggtgaaaacgaggtgacggtacctatacaaaaagaagaacgatatatttacttgggggtatttcgtccgaatggatggatacctgtagatatggcgataagtaacggagataaggtgactttccataaccttgagcctaatatcatttatcaaacgctcattttcgatggtaagcagttgcatccggctggctattcgtttattttcagaaatggcaaggccgagttgcttgaacctgacaggataaatagagaggaagctgtgttgaagagaaagatgtctatcaaaccaactatctccgaatggttatatagatcaaccagaggcgctaggatagaagcagccaatgatactactttcagacaagctgatttattatatcagattaaagattcgtttacaactaattattatgagttctgtccgttgcattcgcatcagaaatataaatatattcgttatgttcctccggtaggcactagagtcgagttggcggagttggctttgtatgaagatactttaggtaaggcgaaaatttctatgcatgcgatgacttctttgaaaccgattgacaagatagggaacattacagatggtaatattctaacttattttcaggcaactgatatgacatccgctattacttttaagttagaaaaagaatcttccatcagtaggataactttttctccccgtaatgatgataattatattagtccgggcgatgtctacgaattgttttatcaagatggagtgtctggttggcaatctttaggaattcagactgctgttactcgggaggtccgttatattgtaccgaaaaatgcattgttgtggctcagaaaccttacgaaagggcgggaagaacaaatatttatttatagagataaaaagcaatattttacgattgatataactactgactcatttaatcgcaataaaataaatgagtgaagaaaaaaatgactgtacaaacttgattaatagatatttttgtctaaatttggcaaacatgatacaaacttacatacagtatacaagaaattatatgtgagataattagaataaacaaaccaataaatacgatgaaaaataattttacatggtttttactgtgccttgcatgtatgatgacgctctcttgttccgacaagaagaatactgcagatgaatcggagaaaggcgtctccacagtccttccagatacgaagaatgaagtagctgttcagatattgaagaagcgtgattttcatcacgaactggtgagtaacggcaaaatcagtgcccgtggcaaagccgatctgcgttttgaaaccggtgaagtcatcgctcatatctatgtgaagaatggcgaccgtgtacagaaagggcagaaactggctgatctggataaattccgtctggaacagaaattatcccagtcggaagatgctttactgaaagccgaacttgaattgaaagacgtactgatcgggcagggatattctcctgacgactttagtaaagtccctgccgaaacaatgaaaatcgccaaagtaaaaagcgggtatgaacagtcgaaatcccagtatgaactggcgaaaagagagatggagcatgctacgttgattgctccttttgacggtgtagtagctaatttattttcaaagccttataatccggcaaatacttctgaagcattctgtactattatcgattccaaaggaatggaagctgatttcacagtgctggaaaatgaacttgcttttatcaggatgggagataaagtggtaattactccttatgccggaggagatgcgtttgaaggcagtgtatcagagataaatccattggtggatgccaacggcatggtgaaagtgaaagcattggtaaatgcgggaggaaaactgttcagcggaatgaatgtaagggtaagtgtccgccgttcgctgggagagcggctggttattccgaagagtgccgttgtattgcgttccggcaaacaagtggtatttaccctgaaagacggcaaggcaatgtggaattatgtgaatacgggactggagaatgcgatagaatgtgtcgtctccgacaagtcacagaaaggtatcgaggatggtctgctggaaggagatacggtgatcgtcaccggaaatctgaatctggcgcatgaggcggaagtctatgttaaatgaagaattaagaattaaataatgaatctatgataaaattcttaattcagcgccctattgccgtattgatggcctttaccgcctgtttcatcatcggactggtgacgtactctacgctgcctatatcgctgcttcccaatatcgctattcctgagattacggtacaggtggcgtctgccaatacctctgcccgggaattggaaaacacgattgtcaaacctttgcgggggcagttgattcaggtctctaccctgaaggatattcatagtgaatcgagagacggggcgggcattatccgcttgtcatttgaatatggaacgaataccgaccttgcctttatcgaggtaaatgagaagatagatgccgccatgaactatcttccgaaagaagcggaacgcccgaaggtaatcaaagcgagtgcaacggatattcccgtattctatctgaatctgacactgaagaatgacagtgcttacggagctacggaacagcactccttccttgaattgtgtgagtttgccgagtctgtcatcaagcgcaggatagagcagcttgaagaagttgccatggtggacgtgaccggaattttggaacggcaagtacaaattgtgcccgacaaggacaagctcgccatgatgggactctccattggagatatcgaatcggctttatcctctaataatgtggaaccgggcagcatgacagtgcgcgacgggtattatgaatacaatattaaattctcgacattgctgcgtacagcggaggatgtggaaaatatctatctgcgtaagggcgaccgcatcgtacagttaaaagacttctgcaaagtaagcgtcgtacctgtaaaggaaaaaggagtatccctgtccaatggaaaacgggcggtgagccttgccgtcatcaaacaggcggatgagaacatggataagatgaagcaggcgctggttggcacgatgacctattttcagttagtatacccggagatcgatttcagcatcagccgtaatcagacggaactgctggactacaccatctctaatctgcaacagaatctctccctgggctttctctttatttgtctggtagcggttctgtttctgggagatgtaaagtctcctttggttatcggactcagtatggtggtgtccatcgtgatcagttttgtctttttctacctttgcaatatgtctctcaatatcatttcacttgccggattgatcctggcattgggaatgatgattgacagttcgattattgtgactgagaatatatcgcaataccgtgaacggggatactccttgcgccgtgcttgtgtgacgggaaccagtgaagtggtcacccccatgctgagttcttctctgacaactattgccgtctttgccccgctgatttttatgagcggtattgcaggcgctattttctttgaccaggctttttccgtcactgtaggactgatggtgtcttatctcaccggtatcatgctgcttcccgtactttatctgctggtttaccggacaggtgtccgcacccggaaatggaagtggctttctttcaaatttaataacccgatcaaggatcacacgctggaccgcttctatgatgcgggtgttgactgggtatttcgccataaaacgttcagtgtactgttctgtgtgatttccattccgctttgcgtattcttctttttctttatagacaaagaacggatgcccgatatcgaggaaaatgaactgatcgcccggatagaatggaatgagaatatccatgtggatgaaaacaaacgacgggtggatgaacttttcaaggaactgaaagatgaagtactggagcaaacagcctctatcggcagacaggatttcattctcaatcgggaacgggaactgtcttcttccgaagcggaactttatttccgtacggagacttccaatgctattgcctctttggaacaggcggtatatcggaaactgaaggaacgttatccgctctctgtcatttctttctctccgccggaaacggtatttgagaaactctttgtgacgggtgaaccggatgtggtggcggaattttacacccgtaataaagcggaagcccccaaagcggaagcaatccgtagcgttgaacaggaactgggacgaaaaaccggaatcaatccgacaggtatcgccttcgaaaaccagttgaatctgagtatcagcaaagagaaactcttgctctaccgtgtttcctacaacgaactgtatcgggtactgaaaacggctttccgggaaaacagtgtgacgatgctgcactcttatcagcagtatttgccgatcaacattgccggggatgaaaagactgtgaacgaggtgttgcaggaaacactggtgcagacgcaaccggacaaccgtgggaatgtcgattttatcccgcttcgggaattgatcaacgtagctcccgccgaagacttgaaaagtattacttccggacgtaacggcgagtatgtcccgttcgacttttacggcgtgcaggatgcgaaccggctgatgcgtgaagtgaaacaggtggcggaggaaacaggggactgggatacgggcttctccggcagtatcttctccaacaaggagatgctggatgaactggtcgtgattctgttgatctcactgctgctgatgtatttcattcttgccgcacagttcgagagttttctgcagccgttgctggtactggcggaaatcccgattgatgtggcatttgccttactcttgctttggatatgcgggcatacgctgaatctgatgtctgccatcggtctgattgtgacctgtggtattgtaatcaatgactctattctgaaactggatgcgatcaatgaactgcgcaaggcaggcgttcctttgctggaagctattcacgaagcaggccgcaggcgtctgcgtccgattatcatgacttcgctgacgaccatctttgccatggtgccgttgctgttctcctcggatatgggatcggaactgcaaaagccgttgtctatcgccatgataggcacgatgtccatcggtacggcggtcagcctctttatcataccgctgctttactggtttatctatcggggaaaaagcgggaatcacaaaccaaatgaaaaacatgttgaattatgaagaaatcatccgttctttttgtattgatggcagcatcggggatatgtttctcttcagtatatgcccagaaacgtctggtgttggacttgaaccagactatcgctttagctaacgacagttcgctggagtcattccgcacacaaaatatgtatctgtccggttattgggaataccggacgtaccgggcaaaccgtttgccgagtctgacaatggaccttaccccggcacaatataaccgggatatcacgaaacgttatgattcgggacaggacctggatgtctaccgtacgcaacagtcatattatgcctatggaggattaagtgtccgtcaaaatctggacctgaccggaggtacgttctatctggagtcgaaccttgcctatatgcgtaatttcggggataatagtgcgacgcagtttaccagcgtcccgatacggctcggttattcgcagagcctggtcgggtataatcctttcaaatgggaccggaagatcgaaccgctgaaatacgagcgtgtgaaaaaggaatttctttataatgtggaaaaggtttcggaaacggcgacgaattatttcttttcgctggcgatggcgcaggcggaatacaaactggcaaaggaaaacctcgcatctacggatactttgtaccgcatcggacagcaacggcaccggatcgccgctatttcacaggcggacctgttgactttaaagctggataaagtgaatgcacagaatacattgcagaatagggcaagcgccttgaaacgggcaatgttctcactggcatcttttctgaatctggataagaatacccagatcgaactggagcttccttcacgcccaagtatgatggagattccggtggatgaggctttgagatggggaaggagcaataatccgcagttgctggaactgaagcagaatgtactggaagcggagcggaatgtggacagaacaaagaaggaatcccgtttcaatgccagcgtgaatgccagtatcggtttcaaccaggtggcggaaaacttcggagatgtgtatcataaaccgatgcagcaggacttggtagcggtcagcgtatcgattccgctgctggactggggcgttcgtaagggcaaatacaacatggcacggaataatctgaatgtagtgaagatttcggcacgtcaggatgagatcagtattgaggaggaagtcatcatgacggtgagtgattttaatatccagcagcagttgattgccagtgcggaagaagcgctggacctggcgatactggcttataatgagacaaggcaacgttttattatcggtaaagcggatattaatagtctgacgctttcgctcaacaggcagcaggaggcgcagcgcaactacatttctgccttgcagaactactggctgaattattataaaatacgtcgtctgactttattcgattttgctacgaagctttctctttcggatcgtttcgactttaatggaggaagactgattagatagtaatttcttttgggatatagacaaatgaatcatgcaagatataggttctgaaattaaaaagtcatcaaaggcttccgcttttacgctcattgtcgcttttatcagcgtggcgttggtcgggctggcacttgttccgttgctgccggtgaagctgaatccgtcacggaccttacccggattttctgtgtggttcggcatgggagggacttcggcgcgtgtcgtggagatgacggctaccagcaaactggaggcgatgcttgcccgtgtcaagggaatacaaagcatatcttcgacttccggcaatggctggggaagtataaatgtgagtctggacaagcatgcagatgcggctgtcgcacgttttgaggcttcgaccatcattcgtcagacttggccggaattgccggcgggagttagttacccgtacattcagatggcaagtccggagcagaaaagtcagggaccttttatcgcattcacgattaatgcgcctgccactcccagtctgattcagaagtatgcggaggaacatataaagacacgccttgcgcagcttccgggaatctataagataaacgtcagcggagccacaccgatggaatggcgtctggagtatgattatgagcagttgcgtgcgttgggggtgagtacggatgaaattagtcaggcagtcggtctgcattatcagaaagagtttctggggacttatgatgtggaacaggcggcttcgggcaaggaatggattcggttggtgctgatgcccgaacatgataaccgggagtttgacgccgggcagatacaggtgaaagtgaaggatgggagaatcatccgcttggacgaactggtgaaggtcgtccgtatggaagagcagcctcagagctattaccggatcaatgggctgaattcgatttatctgtctgttgtcgctgaagaggcggctaatcagctggaactgagcaaaaaagtacaggcgtgtatggatgatatcagactgtcgcttccggcgggatacgagattcataccagttatgatactacagagtttatacatgacgagctgaacaagatttatttgcgtacgggagtgacggtggctatcctgctcttgtttgtactgctgattactttcagccccaaatatctgtttttgattgtcaccagtctgaccgtgaatatggcaatagccgttatcttttactatgtcttcggactggaaatgcagttatattctttggcgggtatcacggtttcactgaacctggtgattgataatacgattgtgatgagtgatcattatcttcgatgtaaaaaccggaaggcgttcatgtctgtattggcggctacactgacaacaatgggagcgttggtcatcatcttctttctggacgagaggattcgtctgaatctgcaggattttgccgcagtggtgatgattaatctgggagtttcattattggttgctctgttctttgtaccttctttgattgataaaatcgggttgaaacgacgcaggaagtcttctctgaccggagtgaagagaaaatggaaaatggggaatacccgtttcttaggatggctgcgttcgaagatgcgaaggggaccggtctatttcagtcatttctacaggtggctgatacagaggctttgccgctggagagtagcggtttgtctgttgctgttgctggcattcggattaccggtctttctgttgccggaaaagatggatggggatggcaaatgggcagagatttataataagacactggggactcctacctataaggaaaaggtgaaaccgatagtggataaagcgttgggaggaagtctgaggctgtttgtgcaaaaggtgtatgaagggagctactttacccggaatgaggaggtggtgctttatgccaacgccaatttaccgaacggcagtacgcttgaacagatgaatacactgatcaagcgaatggaaacttatctgagcgagttcaaggagatcaagcagtttcagacatcggtagaaagcgcccgcagggcatctatcagcattcgtttcacaaaggaaaatcagaaaagcgggttcccatatacgctgaaagctaacatgatcagtaaagctctccagttggggggaggagattggagtatctatggattacaggatcagggattcagtaatagtgtacgcgagaacgcgggatcattccgggtgaaaatgtatggatataattatgatgaactttatagctgggctacaaaactgaaagaggtcttattgtctcatcgccgtatcagggaagttacggtcggttctaatttctcgtggtggaaggatgattatcaggagttttattttgagctggataaacaacggatgatcggagcggggatcggagccggagaactgtttgctgctattcgtcccatatatgggcggaatcaggaaatcggttccgttgttaccgaagatggaacggaaaaaatcaaactctcttcccgccagtcggatcagcgggatatatgggccatgcagtattatcctttctgtgtaggcgataaagagtataaactggcggaactggctaaggtagagaagggacagatgccgcaggaagtggcgaaggagaatcaacaataccgcttatgcttgcaatatgagtatatcggtgcgtcggaacagggaaataagttgctgaaaaaagacctggaagagtttaatgaacttctcccgatgggatataaggcggaagcggaaagtaataactggtcatggggtggaggtgccaacaaacagtatcgcttgctcctgattgtgattgctatcattttctttattacaagcattctgttcaattcgttgaaacagccgttagcgatcatctttgtcattccgatctcttatatcggtgtgtttctgacgttctactggttcaagttgaactttgaccagggtggtttcgcttcgttcattctgctctgcggtatcacagtgaatgccagtatttatattttaaatgagtacaatgcgattcgaaaacgctttccctgcctttcttctcttcgtgcttacgtgaaggcatggaatacgaaagtgatccccatttttctgacggttgtttctactatccttggctttatcccctttatggtgggagcagagaaagaaggtttctggtttcctttggctgcaggtactatcggtggattggtaatgtccgtgatcggcgtgtttattttcttgccggtactgactttgaataaaaagaagatgatggtgaagaagccttgaagaaataaattagctattagcaaaaacaaattagctaatagctaatttgtttttgctaatagctaatcgaaataaggtataggagataattcaccagttatttcctgcattgctgctgccgatcagcatttctacccgttgcttatacaagttggctccctcagcgatgttctttcccgcatctgcggttcccattccgtaaacaacaacaggcgtttgccacgacatccccgaatgaatggcactaacctgataaggacgtaaaagctcatccactgtgaagcggtttctgcctccgctgcggtatgcttcatattcggaacctgtggtggttactactgtcaatggtttcccggctactgccggagtcttggaaaggaaggtgaatacttcgtcctgccattttttgagcaatgacggcgcagccatccaatgaaagggaaattgataaatgagggcggaagcatcggaaatgattttgctccattcgtcaacatcaaaagaagcgccttgctggtcgtaaagattgaatactgctacgccttcaatatcactcacagcatcaatcagtgctttgtttgcttgtgattccttcatattgggatgcgccaggagaatcaccacttttcttaaatctttattcataatcaatcgggtatttaggatgaaacaactacatctataatataaaggtctaaaaataagaaaaagttttcgaaactcaatatcttaattaaaaataaaagaatctctctttgcttttgaatttgtatttttgcaggcacgtccgtaaggcgttattttagataataaatttatatatgatagatttcacccaatttccttctccttgctatattatggaggaagaactcttgcgaaagaacctgtgtctgataaaaagcgtagccgacagggcaggagtagagattattctcgccttcaagtcattcgccatgtggcgttcatttccgatattccgcgaatacgtggagcattccacagcaagttctgtgtatgaagcgcgtctggcattggaagaatttggaagtaaagcccatacttattctcctgcgtatacggaacaggattttccggaaatcatgcgttgcagcagccacatcacttttaattcaatggcacagttccgtcgtttctatccgatgacagtggccgaaggaagcggaatctcctgcggtatccgtgtgaatcccgaatattcggaagtagaaacagaactttataatccgtgcgcacccggtacccgtttcggaatgaccgccgacttattaccggataccttgcccaaaggaatcgaaggtttccattgtcattgtcactgcgaatcttcttctttcgagctggaacgtactttgcagcatctggaagagaaattctcccgctggttcccgcaaattaaatggctgaatctgggaggcgggcatctgatgacccgaaaagattatgatacagaacatctgattaaattattgcaagacctgaaagcacgatatcctcatttgcagatcatccttgaacccggttctgcttttacatggcagacaggagtcctgacttcggaagtggtagatatcgttgagagtcgcggtatcaagacggctattctgaatgtgagtttcacctgccacatgcccgattgtctggaaatgccttatcagcctgccgttcgtggtgcggagatggggaatgaaggagaatttatttatcgtttgggaggtaattcttgtttgagtggtgattatatgggattatggagtttcgatcatgagttgcagatcggagaacggattgtgttcgaagatatgattcactatactatggtcaagacaaatatgtttaacggaatccatcatcccgccatcgctttgtggacaaaagaagggaaagcggaaatatacaagcaattttcttatgaagactatcgggaccgaatgagttgataatcaaaacaattgtttgtttgcggaaacaaagtgtgcagattcttgtgaaaaaaagatgcagaatgtttgcagaattacggaaaatccctacctttgcaaccgcaaacgaaaaaatgcggaaatagctcagttggtagagcataaccttgccaaggttagggtcgcgagttcgagtctcgttttccgctcatgtttctttgaaatgttgggaatataatctttgcccaggtggcggaattggtagacgcgcacgtttcaggtgcgtgtgtcgagaggcatgcaggttcgagtcctgttctgggcacaaagattttaactttaaaattctggagaggtggcggaattggtagacgcgctactttgagggggtagtgacagttatgtcgtgggagttcgagtctccttctcttcacagtcattaaagttatttgcggaaatagctcagttggtagagcataaccttgccaaggttagggtcgcgagttcgagtctcgttttccgctcatgtttctttgaaatgttggaactaaattttgcccaggtggcggaattggtagacgcgcacgtttcaggtgcgtgtgtcgagaggcatgcaggttcgagtcctgttctgggcacaagaaattcagatttctgaatggagaaaatttagtttgcggaaatagctcagttggtagagcataaccttgccaaggttagggtcgcgagttcgagtctcgttttccgctcaaagtagtgaggttgtcagtcgataagattggcgacctctttttgtaattacgaaagtcgatgtacttcccccaaaaagagtgtcatcgactcacacagacctataattaatttaagaacttgtgatatgttaacacaaatcattaatgcgcgcatccttacccctcagggctggttgaaggatgggtccgtacttattcgtgatcataaaattctggaagtgactaactgcgacctggcggttatcggagcaaaactgattgatgccaagggcatgtatatcgttccgggaggagtagaaattcatgttcatggcggtggtggaagagactttatggaggggacggaagacgccttccggacagcgattaaagctcacatgcaacacggaactaccagtattttccccacactttcttcttctactattcctatgatccgtgcagccgcagaaacaaccgaaaagatgatggcagagccggacagtcccgtactcggcctgcatctggaaggacattacttcaatatggagatggcaggcggacagattccggagaatatcaaaaatcctgatccggaagagtatatccctttgctggaagaaacccattgcatcaaacgttgggatgcggcaccggaacttccgggggctatgcagttcggaaagtatatcaccgcaaaaggcgtattggcatctgtaggacatacacaggccgaatttgaagatatccagactgcgtatgaggcaggatatacgcatgctacccatttctacaatgctatgcccggatttcacaaacggaaggaatataagtatgaaggtacggtagaaagtatttatttgattgatgatatgacagtggaagtcgtggccgatggcattcatgtgcctcctaccattcttcgtctggtctataagataaaaggagtggagcgtacgtgcctgatcactgatgcgctggcttgtgcggcaagtgacagtaagactgcttttgatccgcgtgtcattatcgaagacggtgtgtgcaaactggcagaccgctctgcattggcaggaagtgtggcgacgatggaccgtctgatccgtacgatggtgcagaatgctgaaattcctttggcggatgctgtgaggatggcttccgagactccggcccgtatcatgggagtgctcgaccgcaaaggtacgttggaacgtggcaaggacgcggatattattgctttggatagagatctgaatgtaagagcggtctgggcgatgggacaattggtagaaggtacaaacaagctgttttaacgactaaaaaagaaaacgatgttaactcaaataatcaacggtagaatacttactccgcaaggctggctgaaagacggctctgtattgatttgtgatggaaaaatattagaggtaaccaacagtgatctggcagttatcggtgcaacagtgattgatgcgagaggaatgacaatcgtaccgggatttgtcagtatgcatgcgcatggtggcggcggccatgattttaccgaagcaacggaggaggctttccgtatcgcagcaactgctcatttgaagcatggagctaccggcatatttcctactttgtcatctacttcgtttgagaggatatatcaggcggtcgatgtttgcgagaagctgatgaaggaaccggagtctccgattctcggtctgcatatcgaaggaccttatctgaatccgaagatggcaggaagccagtatgacggttttctgaaaactcccgatgcgaatgaatatatgccgctgttggagcatacttcttgcatcaagcgctgggatatcagtcccgaattgcatggggcacatgattttgcaaaatacacttgttcaaagggaattatgacagccgttactcatacggaagctgaatatgatgagattaaggcggcgtatgcggtaggattctcgcatgctgctcatttctataatgcgatgcccggttttcacaaacgtcgcgaatataaatatgaaggtacggtagaaagtgtatatttgacagatggaatgacggtagaagttattgcagacggtattcatttgcctgctactattctgaaactggtttataaactgaaaggagttgagaatacctgtctggtgactgatgcgttggcttatgctgccaatgaagggaacgagccgattgatccgcgttatattattgaggacggagtatgtaaaatggcggatcattctgcattagccggtagtctggcgactatggatgtgttggttcgtacgatggtgaagaaagcaagtattcctttggaagatgctgtgcgtatggcttccgaaactcctgctcgtctgattggtgtgagcgatcggaaaggggcattgtctaaaggtaaagatgctgatattgtgatacttgataaggaattgaatgtacggtgtgtctggtcgatgggaaaagttgttccggggacagataggttgctgcataaatgataagtgctatctgttaaatctgaaaatagaaagtccgaacctttaaattgcaaaaagcaattgggattcggactttttcagtaagaaaagtagtaatgtgagtactctatattctattttatcatgaaaatagagtcgtttctataaactctttcaattgaaccttattcattgtaccgagtttcattatcggtttgccattcaccgggcaaagcaaaaggttgggaattgtccgaatcttgaatgcactttccagttcctcttcctgatcgacgtctactttataaatgtccagtctccctttatattcttctgctaattggtccaatatgggtgataatgccttgcaataaccacaccatggagcatgaaaatcgactaaacaaggtttatcccctttatattcccaattatccggataagattgataatcagcaactttctcaacaaagctttctttggttaaatctataattttcatatttcctgtttttaatgattcattatttatttctactttgcaaagataggggtatggtagagaaagagggatagccattcttcctgttgtgtttacaatttttcctttccctagatattttctaatcaaattctaatctgaaatgagagccttataatcgcttttatccagcctctaccgttgcagagttgtacttttgtcggaaaacaaattaaggtaacaaaaagattgcgatgaacagagcatttttatttttactatttcttctattggcaggaaagatgtgtgcgcaacaggttgcaggcacattgacactgaaagaagcagagcagcgttttttagagcgcaatttatcgttgatagccgagcagtacaatatcgacatggcacaggcgcaggtattacaagccaaattgtttgaaaatccggtcatttcgctggaacagaatgtctacaaccgattgaacgggaagtattttgattttggaaaagaaggggaagctgttgttgaaatagaacaggtgatccatcttgccggtcagcggaacaagcaagtccggctggaaaaaatcaataaggaaatagctgaataccagtttgaagaagtaatgcggacgctccgtcaggaattgaatgaaaagtttgtagaagtctactttctttctaagtccattgccatctatgaaaaggaagtaaattccctgcaagtacttttgggcggaatgaaaattcagcaggaaaagggaaacatctctttaatggaaatttcccgtctggaatccatgctcttctccttgaggaaagagaagaacgaacgggagaatgatttactgactaccaggggagaactgaatttattactgaaccttccggaagatacacaagttcaactctcattagacgaagaagtactgcaacaactggacctgtcgcaattatcatttgcagacctgaaagcaatcatcaatgaacggcccgaccaaaagatcgcccgaagcacagtgaatgcctcccgtgcaaatctgaaactacagaagtcaatggcctttcccgagttctctgtgaaagggaattatgaccgtgtaggaaactttatcaatgactatttcgcgataggagtaagcctgtccgtacctatcttcaaccgtaatcagggaaatatcaaagcagcccgcttcagtatccaacaagcgggagtgcagcaggaatatgccgctaatcgtgccgatatggaacttttcaccgcttatacgtctctggagaaagcaactcaactctatcaatccactaatatggacctggaacgtaacttcgagaaattgatcacaggagtcaatgagaatttcaccagaaagaatatcagcctgctggaatttatcgactattatgacagctataaagaaacctgtatccaactatacgagataaagaaaaacgtatttctcgctatggaaaacctgaatacagttgtcggacaaaatgtattgaactactaataaaccgaccaatatgaaacgattaaagatcacaatccataaattatcaaagactatgaactggaataaatttcttccttgtatattgtttggcagccttttgggagcatgctccggaaaaggagaacaacccaaagtagaaccgactacactatgcctgacggacagcctgctgagaatcgtatccgtcgataccgtgcacgtctgtgaagtggtagatgaactgacattgaatggacgggtcactttcaatcaggatcaggtggcaaatgtgtatccgatgttcggaggaaccgtgacggaactgcgtgccgaaataggagaccttgttcgcaaaggagaagtgctggcagtgatccgtagcggggaagtggcagattatgagaaacaattgaaagaagctgaacaacaacttttgctggcccggcggaacatggatgctacacaggatatgtacacttccggcatggcatcggataaagatgtacttcaggccaagcaggaactggcaagtgcggaagcggaagaaagacgaatcaaagaaatattctccatttatcacttctccggaaatgctttttatcagctcaaatctcccgtatcaggctttattgtggaaaagcagattagcagggatatgcagctgcgccccgaccagggggatgcgctgtttacgatttccggtctgtccgatgtatgggtgatggcggatgtgtatgaaagtgatattagtaaggtttccgagggagctgatgtccgtatctcgactttggcatatccggaaaggacatttacaggtacgatcgacaaggtctatcatctgctggacagtgaaagcaagacaatgagcgtacgcatcaaactgaaaaacgaggattacctgctgaagccgggtatgtttacaaacgtgagcgtgaagtgtaaagcggaagatacttccatgcctcgtatcgactcccatgcgctggtgttcgagggaggaaagaattatgtggtcacagtagagcctgaccagcgtctgaagataaaggaagtagacgtttacaaacagttgagcaaggaatgttatgtccgttccggtctttccgaaggagacagggtactgaataataatgtattgttagtgtataatgctttgaatgcggattaaaaatcagagaatagtatgcataaattcatagataatatagtagccttctcgctgaagaataagttctttatattcttctgtacggtgattgccgttatagccggagccgtctcattcaaacatacgccgatagatgcctttccggatgtaacgaatacaaaagtgacgatcatcacgcaatgggcgggccgtagtgcggaagaggtggagaaatttatcacgattcccattgagatagccatgaatcccgtacagaaaaaaacggatattcgttcgaccactcttttcggactttctgtgatcaatgtaatgttcgaagatcgtgttgatgactttacagcccgtcagcaagtctacaatttgctgaatgatgccgatctgcccgaaggcgtgactcccgaagtacagcctttgtacggacctaccggagaaatctatcgctacaccctgcgcagtgacagacgtagtgtacgcgatttgaaaacgattcaggactgggtgatcgaacgaaatctccgttcggtatcaggtgtagctgatatcgtcagtttcggtggcgaggtgaagacattcgaagtgagcgtgaatcctcatcagttgattaattacggaattacctctctcgaactttatgacgcgatagccaagagtaatatcaatgtaggaggagatgtcatcacgaaaagttctcaggcatacgtagtccggggaatcggtttgataaacgacctggatgaattgcgaaacatcgtagtgaagaacatcaacgggacgccgattctcgtaaagaacctggcagatgttcacgaatcctgcctgccccgtctcggacaagtgggacgaatggatgagaacgatgtcgttcagggaattgtagtgatgcgtaaaggggagaatcccggtgaagtcattgcaaatctgaaagataagatagaagaattgaatcagaatgtacttcctgaagatgtacggataataccgttctacgaccgtgaggacttggtgaacctggcggtaaaaacggtgacccataatctgattgaaggaatattgttggttacgtttattgtgttaatcttcatggcagattggcggacaaccgtgattgttgcggtgattattccattagctttgttattcgcatttatttgtttacgcgtgatggggatgtctgccaatctgctttctatgggggccattgactttggtattattatcgatggggcagtggtgatggtggaaggtgtgtttgtcgctttggacaagaaggcgaaagaggtgggaatgcccgcattcaatgtgatgtccaagatgggactgatccgtcacaccgccaaggataaggcaaaagcggtatttttctccaaactgatcatcattaccgctttgattcctatcttctcttttcagaaagtggaaggaaaaatgttctcacctttggcatatacattgggttttgctttgctgggtgcgcttattttcacattaacgctggttcccgtcatgtcgtccatgttgctgaaaaagaatgtacgcgaaaagaacaatcgctttgtccatttcatcaatcaaaagtgtacggctctttttgatactttctatgcccatcgtaaactgactatcggattggcaactgtggttgcaggagtcggtttatggcttttctccttccttgggacggagtttcttcctcaactcaacgaaggttcgatctacatccgtgctacgctgccgcaaagtatatcgctggatgaatccgtaacgctggcaaataagatgagaaagaaactattgactttccccgaagtgaggcaggtactgtctcaaaccggacgtcccaacgacggaacggatgcaaccggattttataatattgagtttcatgtagatatttatccggagaaagactgggaaagcaagctgaccaaacttcagcttatcgacaagatgcaggaagatttatccgtttatcccggcattgactttaacttttcgcagccgattacggataatgtggaagaagcggcctccggtgtaaaaggctctattgcggtgaaagtgttcggtaaagacttgtacgaatcggaaaaactggccgttcagattgataagatattaaataccgtgcagggaattgaagacttgggagtgattcgcaatatcggccagccggaacttcgtatcgaactgaatgaacgtcagttggcacgttatggagtggctaaggaggatgttcagtctatcattgaaatggctattggcgggaagtcagcttcgctgttgtatgaggacgaacggaaatttaatatcatggtgaggtatagtgaagagttccgtcagaatgaagaggagataggtaagatactggttccggcgatggacggaacgatggtacctattaaggaactggcagatatcaccacaatcacaggaccattattgatcttccgtgacaaccatgcccgtttctgtgctgtcaagttctcggtgagaggacgggatatgggtacggcagttgccgaagcgcagaaaaaggtaaatgcttccgtccatttaccggcaggatattctttgaaatggacgggtgattttgagaatcagcagcgtgcttcgaaacgtctggcgcaggtagttcctatcagcattgccattattttcattattctgtttattctcttctccaatgcaagagatgcaggactggtattgctgaatgtaccgtttgctgccgtgggaggtatcgcagcccttctgataacgggcttcaatttctctatatcggcgggtatcggttttatcgctttgttcggtatctgcatacagaatggcgttattatgatttccgatatcaaggcaaatctaaaactgggttcgcccttacaggaggccactaaagaaggagtccgttcacgtatccgccctgtgataatgacggcggctatggcagctatcggtctgttgcctgcggctatgagccacggtatcggttcggaatcacagcgtccactggcgattgtcattatcggcggattgataggagcgactttcttcgccctgttcatcttcccgctgattgtggaagtagtgtatgaacgaatgctatatgataaaaacggaaaattattgcaaagacgtatctaattcattttctattctttctatgaaagaaacggcatagattaaattttaatttcgttttcagtaggtagaagtgaggaagggacaaaagtcggttgaatcagaagatcacccgtacttttgttcctttttctatttccgaagatatttccagtctggcgttgtaggcagatactattttcagcgtcaggctgaggccgatgccctgacctgcatagtcatgtgtgttgctgcctcgatagaaagactggaatatatgttctatttcttccggaggaatgccgatgccctgatcttttatttcaagaacgaggtattgatctttttggctgagcgtaatgtctacttccttttcagaatatttgcaggcattatcgatgatattctttaaagctattttgagcagataaggattggcctttacagtggaagccttacctgtttcttgatgatggaaacggattcgttcgttcatttttattaagtcattcagcatatccggcagagacattgcctccatattgctttttatgagctcttcatcctgacgtgaaaggaaaagaagatggcggatcagattggagattcgcttgctttcggatgagattcgttgcagggcttcgatatattctccggtacttctttctttcagcagactgatttcacattctccctgtatggcggttatggggttgttcagttcatgcgaagcatggctgacaaaggacttttcagctttaaaagcactgtccagacggtcgagcatgctattcagtgttttgatcatgtcttccagttcatcgttgtttccggtcgtctttaaccggcggttcaggctgttggctcgtatcctcttcagttctttcagtatatgctgcagggggataagaatacggccggaatagattttcccgactaaataaatcaggatggaactgaataaaaccagaaagatggagagaagcaagaggtgttctttgatttctgcaccgtacacattccgggacatgactaggacgatgaaattcccttcattatcgggataataaagggcggctcccaactggtctttgtatttaaaagaaaaaggaatgctgtcttcaccggctatcaggagtgcctgctgatgctgggtcagatatttgttcagtgtgtcacggacttcggagagactgtccatatttaaaagaatctcatgagcttcgggcaggagttcgtcatatttgcgctggataatctggtaactctgttcgtctatttcgtctttctcccagtgcttttgtgcggtcagatatgctttttcacgaaggtaggaggcatagagtttattgataaactgtgtgctgaaaagatagaatacggcaataatgatgatagttgtcagtacactgagcaacgtatagaagagagctattttagaacctattttcatacacggatttatttgatggatgttcaggcattcatgatatatcctaatcctactaccgtatgaatcagtttcttgtcgaagtcacggtctatctttacccgtagataattgacgtatacgtctacgatgttggtatttgtatcaaagttcttgtcccatacgtctttgagcagcgtaatgcgtgacaaggctaccccctggtgagtcatgaaatattcgagcaggcggtattcttttacggtgagatcgatatccgcatcacctctttttgcccgtctggtgttacagtccaataccagattgtcgcaagtcagttgattggttacagcctccttgtttcgtcgcagcagcgccttgatacgtgcttccagttcctgaaaactgaaaggcttgacgagataatcgtctgctcctgcatccagtccttttacaatgtcttccgtagtgcctaaagccgtcagcataatgaccggtgtctggtaaccgaacatctgccgatagagatggcaaagttcgagcccgtttattttcggcatgataatatccaggattaaaagatcgaaaggttcttcctgaaggattttccaacccgtatttccgtcatgacagactgttaccgaatgtccgaactctttcagtccccgttcgataaaggaggcgatattgacttcatcttctgctaatagtatttttgccataaatctacattgtttagatgcaaagatactttttctttgcatctgaagaaagaaaaacggcatacatttaagtgtttctcctttctgaactgtattatatataaacagacgattatactatgaaagtaaaacatttagttggagcttttctgtgtgtgctgggatgctatgcttgtagtagcccgaaaacagaggtccagtcaccggacggacatatcaagatgacattgacggtagacgaaaacggcaaaccgttttataatgtgtcggtggatgactccctcttgatagaaaattcagccatgggctttacggcggctaacggcatcattctggcagaaggttttcaggtgaagaacacgactttcagcagtgaagacgaaacttggacacagccgtggggagaaaacaaaaagaaccggaatcattataacgaaatggcagtcagcctgacaaatgaagatcaggtacaactgacactccgtttccgtgtatttgatgatggaatcggtttccgctatgaatacacggtgccgactgtagattctttattgattaccgacgaactgactactttccgtttccatcgtgacggaacttcgtggtcgattcccgccagtgccgaaacatatgaactactctatcaacaacaaccgatttccgaagtggaaacggctaatacacctttcacattcaagactgcggatggagtttacggaagtatacacgaagccgctttgtatgattttccggaaatgactctgaagcaaatcggccattatacattgaaagcggaacttgccccgtggcctgacggcattaaggcgcgtaagggaaatcacttcacgacctcatggcgcaccatacagatcgcaccggaagctgtcggtttgatcaactcttcactcattctgaatctgaatgatccttgcgtactggaaactacggactggattcgtccgctgaaatatgtaggagtgtggtgggggatgcacctcggcgtagagacctggaagatggacgaacgtcacggagctactactgccaatgcaaagaaatacatagattttgccgcggccaatcatatcgaagctgtcctgttcgaaggttggaacgaaggttgggagagttggggcggtatgcagagctttgatttcaccaagccatacgcggatttcgatattgatgaaatcgtacgttatgccaaagagaaaggcgttgaaatcatgggacatcatgagaccggagggaatattcctaactatgaacgtcagatggatcatgccatgcaatggtataccgatcatggtatccacctcctgaagacgggatatgcaggcgcatttccggatggatatctgcatcatagccaatacggtgtcaatcactatcaacgggtagtggaaactgccgcccgtcatcaaatgactctggatgcacacgaaccgatcaaagataccggtatccgtcgtacatggccgaatatgatgacacgcgagggggcaagaggcatggaatggaatgcgtggagtgaaggcaatcctccttctcatcacgtgatgttaccgttcacccgcctgctgtccggtccgatggattatacgccgggaacttttgatattctgttcttgaaaacgaaggattctccgcgccgacagaagtggaacgatcaggataaaggcaatagccgtgtgaatacgacgctggctaaacaactggctaattgggtaatcctgtattctcctttgcagatggcttcggatatgatcgagcattatgaaggacatccggcattccagttcttccgtgattttgatccggattgtgatgaatcgaaagcactggcaggtgaaccgggagagttcattgcagtggtacgtaaagcaaaaggcaattatttcctgggagcagctaccaatgaaagcccccgtactttagaagtaaaactggacttcctggaaccaggcaagcagtataaggctgtcatctatgcggatggcgaaaaggctgactggaaaacgaatcctaccgattataagattacggaacagattgtaacatctgaaaatacgttgagtatacggatggctcccggaggcgggcaggctgtttcgtttataaaaagtaataggtagtaagtaataggtaataggtaataagtaataggtgagggtaataagtgaggttgttaaagtagagagattgtcggaggataacaagataaaattaagttggttaggttagactgaaaaaacggtggacagagttttgatacctgttcaccgtttttgtttttattgagtatggttttgaaaggatgtgttatccttttgcttcctgatacataaagcgtttgattgatttcttcgcagtcttttcaaattcctcgaaatggattttgactttgcttatctgagaataattgggaagctgctgattcagttcaacacgattggcttccataacttttatgatatcggcctgttgcaagccatgggcaaaagcatcgtcaaagtccggataaatcagtgcgaccaacttgtcgtgctgcaaaacgatcagtgactcggcaacataaggcatattattcagtttgctttctatctcttccggatagatattctgtccgctggaagtcagaagcagattcttgctacgaccgcgaactgtcacatatccttcgtcgtcgattgttcctaaatcacccgtgtgaagccatccgttggcatcaataatttgtgccgtcgcttccggatttttataatatcccagcatcatattcattcccctgcatacgatttctccggcatgtgttttagggtcgggcgagtcgatgcggacttccattcgggtggttgccttgccgcaggaagccagtttcagtgtttcccaacggctggagcaaataatcgggccacattcggtcataccgtaagcgatggtgtagggaaagcctatctttttgaggaacgcttctacttcggcattgaaaggagcaccaccgataatgatttcatcgaagttcccaccgaagatttccatagcagcctgccgcgccaacgatttgattttatcgtttacaatgggcactttaagcaatagtttaccgattttgctgtccactctcggaagaatatcttttttgataattttctctacgatcaaaggtacacaggagatcactcttggctttatttctgcaaaagactgcgcaataatcttcggagacggcatacgtgtcaggaagtaaatgtgcgctccggcagagaaaccatataagaaatcgtataccatgccgaatacatgacccatcggaagcatggaaacgatgtgatcgcccgctttcacgggaagcatctcgaaacagtatgccacgttcgaccaaatactgcggtaggggagcatgactcctttggaatatccggtagtgccggaggtataattgatgatagccagttcttccggacggtccttccggtaacagatatgttcggggcggaaattcttcggataacgctgaccgtaaatagcgttccggtgttcgaaggcgtaagtcagtttctcgttgcgcgataccaatgcagtgaaatcggtgagtgaagcgataccttccagtagcggcattgcgtcttcattcagattttcccatgcctgatcgccgacaaagagtaatttggcttcggagtgattgacgatattgtgaatattatccgctttgaactcatgcagaataggaacgatgacggctccgtaagtgatagtggctaagaaggtgactccccaatgggcactgttccggccgcagactgctattttatctcctggctggataccggcactttccaatacaatgtgaaacttggctatcttgcgcgctacatccttatattgaagcgtgattcctttgtagtctgtcaatgcatctttatcccagtttttaatgatgctctgttcaatataatcaatgaactgatgttcttgttccattcgatttttgcacatttgatttaaaattgcgcaaaaataacatttcattaacggaaaccgaagtttacaattaagttttacggttaattaacgggggaggaaagctgactaaaaagtcagtagtacctttaaatggggctgactaaaaagtcggtagtatcttaactctcctccttcgggaaggaggagtccccgtagggggaggtggtaggtgaacacataactctgttgtttacaatagaataggaataaaccttattttacctaccaccccggctttcagccacctctcctttccgaaaggaggggaattggagatactattgactttttagtcagtccctataaacatcaggattcgctgttggcttcctcgtcctctttgggcttttcggagatgagcagcaatttatcgttcacatgcagtttcagcgttccgttcggtatcaggaactcatccccacgtttcacaatcattaccagcgtgcctttggggagattcatatctttcagcgtatctgcctcttccagcatttcctgtgtgatagtcatatctttgaggtctgtatcaatctcttccggaagttccactccgaaatcattccccgtcttttccagcggtttggacagatgtaacaggcgggcaacgaaagaaaccgttgttccctgcactaccagtgaaacgattgtgatgaagaatacgacattaaagataatattcgatccttcgactcctgcaaccaccggataagtggcgaagataatgggaactgctccacgcaatcctacccaggagacgaacagccgcgatttcattgtaatcttccggaacggaagcaaacagaggaacacacttaacgggcgaccgatcacaatcatgaagacaccgatcaatagtgctactgctgcaacttccagcatttcatgaggattaacgagaagtccgaggcagaggaacatgatgatctggaacaaccaggtaagtccgtccatgaacgtataaatgtctttgcggtgcatgatcttgttgtttcctaccatgatacctgcgatatatacggcaaggtaaccatttcctttcagtaaatcagtgatagagaaggtgaagaaaacaaacgccagcaacaagataggatacaacgcctgattgtcgatgttgagcttgttcagcatacggatagccagttttccgagcacgtatccggcagccgcgccgactataaactgaatgatgaaagaagcggcgatagccccgactcccatacctgccgattggataaactgtatcaggacaatggtgagcatgtatgccatcgggtcgttacttccactttccagctccagcatggggcggaggttgtgtttcagattcatcttctgcgaacgtaggatggcgaacaccgaagccgagtccgtagaggacatggtagatgccagtagcaatgacgtggtgataggcagatagatattcgtccagctcattccggacagccaccagataaataatccggtgaaaagagcggttagtagaactccgacggtagaaagcacgatacctggacctaaaatgggtttgatttctctgaatttcgtatccatacctcccgaaaacaggatgatgcttaaagcaaccataccgatgaattgcgcatcttttgcgtcatgaaactggagtccgagtccgtcacttccgaacaacattcctactacgaggaacagtaataaggtgggcactccgaagcgatatcctgtttttccgacaacgatgcttacgaaaagtaagatagaaccaattagtagggtgttttctgctgtaaatatcataggcaatatattattaagttattaaatgtgtcgtaataggtctcaccgtgcgaagttacacattatttaaaacaaataaagagtctttttggatgtatttttgtgaaaaaaggtagttaaattgtctaaaaagattaattttgcactcaattaatctacatcatacttatggattcaaacaatcttactcctttacggaaaggagtggtaggagtacaattcttgtttgtagctttcggagctacggtactcgtgccgcttttagtggggcttgacccttccaccgccttgttcacagccggcattggtacactcatttttcatgcggttacccgggggaaagtgcctatctttttaggaagtagttttgcgtttattgctccgataataaaagcgacagaactttacggattagcgggcactctgtccggaatggtgggcgtcgcattggtttattttgtaatgagcgcgttggtcaaatggcaaggggtgagggtgattgaacgtctgtttcctccggtggttattgggccggttattattctgatcggtttgtcactcgcggggacaggagtaaatatggcgaaggagaactgggtgctggccttgttgtcgctggttacggcagtcgttgtctcgatgaaagcgaaaggacttttgaagttgattcctatcttttgcggtatcattgtcggttatctggcggcatggcttttctatgatctggatttgtccggtgtgagggatgcggcatggatcgggctgccgcagttcgtgtttcccaagttctcatgggagccgatactgtttatgattccggtagctattgctccggtgatagagcatatcggagatgtatacgtagtcaatacagttacaggaaaagacttcgtgaaagatcccggtctgcatcgtacgttgttgggcgatgggctggcttgctgctttgccggattggtcggcggtcctccggtgacgacttattcggaggtgacgggtgcgatgtcattaacgaaaatcaccaatccgcaagtcatccggattgctgccatatccgctatcttattctccgttgtcggtaaaatcagtgcgttgttgaaatccattccgagtgcggtattggggggaattatgcttttgctgttcggaaccatcgcttgtgccggaataggtaatctggtgaataactgtattgatctgagccgtacaagaaacatcatcattgtctctctgacattgactgtcggcattggcggagctgttctcacgtggggagacttttcattatccggcatcggactggctgctttggtcggagtacttcttaatttgatattaccgaaggacgattgactctgttcttgaaatggtcaggactgtgtcaaggttaatagtaactaaactaggaccgacttttaatcagccccagtttagttactgttgacacccctcctttttatatttaatagttaaggcttagaatgtatatacgtcttgtgtttatgacaagaacttcataatatcttcgtctgcggtactgatgccaccgattccgaattgttcgatcaatacgttttttacgtttggtgaaaggaaggccggaagagtaggtcccagatgaatattcttcactcccagtgccagcaatgccagcaatacgatcaccgctttctgttcgtaccatgcgatgttatatacgataggaagtttgttgacgtcgtccaattcgaatacttctttcagtttcagtgcgatgacagccagtgagtaactgtcgttacattgccctgcatccaatacgcggggaatgccgttaatgtcccctaaagccagtttgttgtatctgtatttagcgcaaccggcagtcagtatgactgtatctttcggaagtttctcggcaaattcggtataatattcacgacttttcatacgtccgtcacatcctgccataacgaagaacttgcggatcgctccgcttttcacggcttctactaccttatccgccaaagccactacctgtgcatgggcaaaacctccgatcaacgttccgctttcgatggccgtcggcggttgacattgcttggcatgtgcaatcagtgcggagaaatctttcggttttccgtctttgcgttcggggatgtagtgtgctccctccagtccgcaggctccggtgatgtagatacggtctttgtaagaagcgttggcacgcggaggaacgatgcagttgctggtaaataggatcggtccgttgaaactttcaaactcttctttctgtttccaccaggcatttccatagtttcctgccagatgcttgtattttttcagttgggggtaataatgtgcggggagcatttcactgtgagtgtaaatgtctatacctgttccttcggtctgttccagcaattcttcgaggtctttcagatcatggccgctgataaggataccgggattattgcggacacctagattcacttccgatatttccggatttccgtagctgtttgtattggcggcatccagttgtgccatggcggaaactccgtgcttgcctgttgccagagtaagctgaaccaattcttccatcgtaatatcattgcgggtgagctcggccagtgcactttgcataaaggcgaagatttccggcgactggtatccaaggttatgcgcatgctcaacgtaagccgccatacctttcagtccgtagtgtaccagttctttcagcgaacggatatcttcgtcgggtgtgcgaagtactcctactgtcctggctttctcttcaaactcatcttcattcccatcccaaagacattcgtcgggagcatttgcaatggttactttgctggcgagttcgtttttcagttgtagtccttcttttatttttctgatgatggccgctttgtcaaaattggcgttagtgatggtgatgaacagggcatcgtagataaatttgtctgcttcttcagaaggatgtccttcccggcgcagatgttcgttgtacacggcgattcctcgtactacaaagagcagcaggtcttgcaggttagccacttcggatgtttttccgcatactccttttaaggtacagcctgtacccattgcggtctcttgacattgataacagaacatactcataacttttacgttttaattagtcttattgattatgaacgcaaaagtagggggaaagtttgaggtaagtttgtaaccaatgttacattgggcgaaaaaaaatcggatgctatgagctaaattaaattagctataatcatattccgattagctataatgaaaaaaagattagctataatgaaaccggagtgaactcttggtcattgaatcagccggatcagccattctttctgtaagatagtaatctgtttccggtcggctataatcataccgtcttcctgcatgtgcgacagttcacgtgccagagaaggacgggagacaccgaagtaatcgctcagttcctgttgcgagcggtcgagggtgatctgtagctgttgctgctgtttgtataaccgtagcagataagatgctatcttttgccggatagtcttgaaggacataaagaaaagcttatccgatagggtacgggcataattggcggatagattcatataattctccagaaactgctcgttcctacgaaaaagctccagtacgctggctttggggatttcgattacttccgtcggttcgttggcggtcacttctaccggaaagcgattctcttctccgaaaaggaaaagaggggcaagggctcttggtgcggcaatgtcttctactttgatgagtcgtccggaatagtctatcatttcgccacggacacttcctttggtcagtatcacgagacggttgcacacatctccctgtcgtgccagtatttctccttttctataagaacgggtgtggaaactgatctcttccagattggcggataacttctccggagtaatcccccggaataatgggttattggtgagtgcaggtgtcataggctggtctgttatttgaattttaatatgaatttcgtttccttgttgtccggtaacagcgtgaggcttccacctgaaagccgcatgatctgacgcgaaatacttagtccgattccgctgcctccttctttggtagtgaagaaagggataaaaatgtgctccgctatttccggtggaatgacgggaccgttattcttaatctcaatcagcacttcttccgtttcgttgcaataaacctgaatgtcgatttgtccgtccggctgatcaccgattgcctgaatcgcatttttcagaagattaatgactacttgcgaaatcagattctcatctgcatgcaggatcaggtcggcaggatcgatctttgtatggaacgtgatgtggtcacaaggattctgatggcgggcaagttccaccattcgttcgatgaatgctttcaagtaaaacaatgaaggttccggagtcggtatccgtgtgaatttgcggtaggattctacgaaagcaagcagcccttttcccgtggcactgatggtttgcagtccgtggctgatctcttcgtctttgtcctccaccatcgagagaagcgtatcgctgagcgaagtgatgggagtcacggagttcatgatctcatgagtcagtactcgggtcaggcgaatccatgagtctatctccttttcgtccagctcaatattaatatcattcagtgcaaggatgcgcagatgttctttgtgtacattgatttctgacacgcgaatagacagattgactgttccccgttcattgtgaaacaccacttgcagcttatctccggaacaacaattttctatcttctccatcagtgtagcatctactttactcaactggcggacatgggtaaatacattcagtcccaaaagccggagtgcttctttgtttttctgatagaccgctccgttatcattgagcaccagcaatcccgtgctgacaaagtcaagaatcagttcgtagtacttttcctgttgggcagtctctgcttttacattatataaaatgtggcccacccgattgagtgcccgattgatctgtttgctctcgggagtaccggactcttcggggaaacggaaggcactgtcattattctccaacgcatcgatcatgaagagcacctgcttgatgtgcaggcgataaagccggacttgccagatgatacttaagatcagcagacaggcactgacgctgaaccagacataagactgatgcacgcccaaacagatagtcgccagacagcaaatgaccgtcagtgataccctgaaccaatattggttggctacttgttgtagaatccggttcataatccgaattttttcatcttgttatagagagtctgtcgggtaattcccagttgcgcagctactgccgaaagatttcctgcacaggcatccagcgctttccgtatcatttgtacttccatctcttccaaggtggaaatattcttctcggaagtttctgtctttcgggaggataactggaacaattccgcagggatttgcaacccgtcgttaatgatgaccaccttttcgattgcgtgctccaattcgcggatattgccgtaccagggatgcgcggtaagcttttcctttgctgccggactgaatttcatcggttccttatcatattgcttgcagaagcggatgataaatctttcggcaagagggacaatatcttctttccgttctctcaaaggagggatttctatatgaatggtgttgatacggtagagtaagtcttcccgaaactcttcccggtctaccatttcctgcaaattccggttggtggcgcatatcagacggatgtcaataggaatcggagtgttacttcccactcgcacgatacttcttcgttggatagccgtcaatagtttggcttgcaggtgataggggaggtttcctatttcatccagaaacaatgtgctgtgatcggcagcctcaaactttcctgtccggtcggtatgcgcatcggtaaaagagcctttcacatgcccgaagagttcgctttcaaataaagattcggtgattgctcccatgtccacagcaatcatttcctgttgcctgcggttggaaagagcgtgaatttcacgggcaagcatttcttttcctgttccgttttcaccggtaatcaggatattggcgtctgtggaggctaccttttcgatcagtgttcggagttgttgcatagacttgctttctccccaatagagtgccggagtgttgaccggttcctttttgtttcctgtcttacgtccttgctgtgcggatgaggcggcagcctgtagtgtttctaccagtttctgattattccagggcttgacgataaagtccgaagcaccttctttgattccccggatagcgagatcaatatccgcataagcagtaaaaagtacgacaggaagctcccgtcgtactttctttatttcgtgcagccagaacaatccttcattgccggtattgatgcccgaagtgaaattcatatctaatagtaccacttccggtgtttcctctcgtatcgcagtggtcagtgtgaccggtgacgacagtgtgacgactttcgaaaagtagttttttaaaaggatttgtaccgctgtcagcacccctttattatcgtctacaatgatgatggttcctgatttactcatgtccgaattggtttgtacgctacaaacttacgaaaaagtaattcataattcaaaattcggatttgaatttatagccattggaactttaatccgaatgataaactcagataatcacggggacggaggtagctatttgttacaccactgatcagataaagatcgcatgtacttatctcgtagaagaaagtcacggactttgccagaaatcggcggttagggtcaatatcataggtcagccgttgtcccatgaaaacatggatacgcaccttgcttgaaaaaccatagtatcctttcggataacgttccggttcgctgacccagaactgattgccgaatacggtattcagatatagtccgcaggaaagcggctcggtagagaatcctttccccaggttgatgctccagggcatatagttctgtttcagtgtcatggtcacttttgccttcttggacgaatacttcgggataaatccgagcaacaggtcagtttcccactgatttcgttttccgtaatcccatccggtaccgaaggagagtaatcccatatttccggcatattgtattttagagtgggtcggaatgatgcgttcccagtttttgcggaagcgatgtacacgtctgtcgtagccggtgcgaagaaccggttcggcaatataaggaagtactgtgtctgctttgactattgtgaatgcagaatcaccctcatgaaaggctatgatagaatctgccttaattgccagtttcagcgagtcgggtttatagttcctgataatggtatctgtcttgcaagtagccgaaagcaggctggggaagagtagaagcatagtcagtactcctgcgcggatcatatatttagtattcaaccagttcatattcgtatttttccggggttatagtaaataccagataactgcgacttttcatgcagtcgctgacaatataatgcacatcgtcatcaaaaaggattctgtcatcgaatccgtgattatgggcggccgtgcagaactgtagttccggatattgggtgatgtagtactggaacggcttcgccacattatcattgaacacatctgcaaaaggatgtgcatgcatgctgactacggttttttcaaactcatccgccctgtccgtcagttcctgttccataaaaccgaaattgggaataggctccgaataatcatattccagcgcattggtattaaggcagacgaatttcacattgcccgcaatgaatgagaagttggtaggtccgaaaacagcctgataagtttctgctccggtacccagacagtcatgattcccgataaggacgacataaggcactttcagtccgttcatgatgtcccgctgccaaagaaactctttggtcagcccgaagtcactcatatctcctccgtgaatgacgaaatcgatatcatctctcttattgacctcttttacaaagtcttctgtctcatcataccatcgctgcgaatcgcccatcgtgataaaacggatggttgtctttcctttgcacttagcttctatttgttcaatgttatgagcatttacgtctgtctctccactgatacgtacatcgtaggggtggtagtctatcagatcgcatccggccagaagcaggcagaccaggagagtgtataaattcttgtttaccataaatagaataatttatttaattgaaaacttgatgcgaagatagagttttcagttgagatatgggcgattgcttgggcaaaataagaaaaatggaacaataaataggcattaatgcatactttccactgagaaaggaaatacgattgtctttgtctaataattagacgcatgtgtctaattattagacagtagatgataggacagataactataaatgattgagaatgagtattctcactattgtggcacgttatctgcactgcatcataaaaaaacaggaatatattatataatcatgagacaaatctattatgtcattcgaactttgctgcgggggcgtagttccaatgttgtcaaggtcatttctttagggcttgggctgacaatgagtattttattatttgcccgcgtggcttttgagcagagctttgataaatgttttaaggattatgaaaacttatatcaagtcttttccatctttacgatgaatggcgaacaactcgaaccgcaagatcaaaattgcggaccggtagcaggtgcaattcttgagaactttcccaaagaagtggaggcggctaccagttactgcctttgggtgcacgatcctctttatcatgggagtgtccgttttgaagccagaaagctggcggccgattccctctttttccagacaatgggaatcgaggtgttgagcgggaccccggtgaaagatttagcacagaaggatgtcgtttacctgagtgaccgtttggcacgaaagatgttcgacacggagaatccgataggtaaggttatctcatacagcaaggagatagaacttacggtaaaaggcaccttcgctgatataccggagaatgcgacagtaagaccggaagcggtgatttctctgccgtcgatatggagccgcaaatggggaaattactcatggagaggtggtgacagctggctggcgttcatccgttttcgtcccggagccgataagtcggtagtgaatgcccggatagacgcaatgatacagaagtatcgtcctgcggaagatcaaaaagtggttggatataccgcttttgtaaaaccaatccgtgacgtatatcgtgataataaagatgtaaggcggatgcggaacatcatgactattctgggtattactattcttttcatcgcttcattgaattatgtgttgatttccgtctcatcactttcctatcgggcgaaagcggtcggtgtgcataaatgcaatggggcaggaaacatgaccatattgagtatgtttctttgggaaacagcgattatcattctgtttgccctgatcctgatgggattgatcttattgaattttcaggatttctttgaagatacggcagctgtcaagttaagcgctttgttcggcttggatcgtatttgggtacctttattaacggtagctgtacttttcgttgtgggtggggtattgccgggacgactgtttgcaaggatacccgttactcaggtattccgccgatacacggaaggtaaaaagggctggaaacgaccgttgctgtttatccagtttgccggtgtagcatttatttgcggactgatgtatgtggtgatgatgcaatattattatatcttgaataaagatttgggttataatccaaagcgtgtagtggtggccaatgccagcttcggtgaggaagaaaaaggaaattatgccttgaatgttttccggaatatgccttatgtggaatccgtgtccagtgccacttatcatcctgtctacggatatagtggaacgattattaatgatgaaagcggacagtcactattttcatcccgttactgcagtgttccggatgattatccgaagatgatggggatggttctgaaggagggacgtatgccccgtggtgacgatgagacagtcgtcaatgagacttttgccgagtggatgcattggggaaacaatatactgaatcgtacggtttataattcgggatacgtatgtaaggtagtgggcgtgatgaaagattatcgcatcggaagttttaccagcccgcaacaaccgttgctgcttatgcacaccaagaggtttggtgattgtatccatgtccggttgaaagaaccttttgccgagaatcttctcaaactgaataaggagatggagagtgcatttcctgataagactatcgaatttcggtcgatgcaacagatgatcaaagagaattataactctgttcgtgttttcagtaatgctacgatgctggcggcaataacaatgttttttgtgatgttgatgggattgataggctacactacggatgaggtccgccgtcgttccaaggagatagccatacgcaaggtgaatggttctgaagcaaccggaatcttggaactgctggtgaaagatgtgctttatgtagctgttgttgcagttttaatcggagtggtagcagcatggtacgtcaatggtatgtggatggatttgtttgccgaacatgttccgctcagttgggctgcctatcttctgatagcaattgcaaatctggcagtcattgtggcatgtgtactttggaaatcatggaagattgccaatgaaaacccggtcaatagtataaagagcgaataaagaagaaataaaaagtataacaacataataaatgaacaagatgatacagattgaaaacattagtaaagtattccgtactaccgaagtagagacagtcgcactaaatcacgtgaaccttgaagtaaaggaaggagagtttgttgccattatgggaccttcgggctgtggcaagtccaccttactgaatattcttggtttattggataacccaaccgaaggttcttaccgattactgggagaagaagttgccggactgaaagaaaaggaacgtaccggcgtccgcaaaggcaaactgggctttgtatttcagagttttaacctgatagacgaactgaatgtctttgagaatgtagaacttccgctgacctatcttggtatcaaatcttccgaacgccgccgcatggtagaagacatcctgaaaaggatgaatatcagccaccgtgccaaacacttcccgcaacaactttccggcggtcagcaacaacgtgtggcaattgcccgtgcggtagtgactaatccaaagcttatccttgccgatgagcctaccggtaatctggactccaagaatggcgcggaagtaatgaacctgctgacagaactgaacaaggagggaaccaccattatcatggtaacacactcacagcacgatgcgagtttcgcacatcgtaccgtacatctgtttgacggtagtgtagtggcaagtgtaacggcataaaccggaacgacaatgagacaaatctattatagcatccgaaccttactgcgcgaacgcggcacaaatatcatcaggataatttctctttcgctgggacttactattggtattttactcttttcgcagattgcgtttgaattgagttatgaacattgttatccggaaccggaacgactggctattgcacgttgcctgaccactaaccttagcacgggggagacaatgggagacgacggcaacaattatgattacacactttttgatgtggttgcatctactttggcgcaggatatgcccgaagaaatagagtttgccagttgtgtcctcaccggacaagggatgagtatatattacgaagacaaattattatcggatgttaactatatatacgctgatacttgtttcttccagacttttggtatccctgtcttaaaagggaacccgaaagatatgatcatgccgggaagtgtgtttgtgtcagagcattttgcccgtgaaacgtttggagatgcggaccctatcggtaaaattcttaaagcagacaggcaaaatgattttactattcgtggtgtatacaaggatatgccggagaatacggtgctcactcacgactttgttgtctccatccatcgggatggaggatatcagggaggatatggctggaagggaaatgatgtcttttacacgtttcttcgcctgcgtaatgctgcggatattgacaaggtgaatgacaacatccaacgggtaatcgaaaaatacactcctgcccagtatgatgactggaaaatgaatttcagtgtcatcccattggtgaagtatcatttgatatcttccgatgtgcagaagcgtttgatcatatatggctttctgggattcgctatcttctttgtggccatcatgaattatatgctgatatctattgccaccctaagccgtcgtgccaaaggagtaggagtacataaatgcagtggtgccagttccggaaatatcttcggcatgtttttggcagaaacaggaatccttgttatcttttccgtacttcttagtcttctgctgatagtcaacgcacatgaaataatcgaagatttgctttctgtccgtctatcctcactttttgcgtgggagacactatgggtgcctttgcttacgattgtgatacttttccttttggcaggtggcataccgggacggctgttttcgcgtataccagtcacgcaggtgttccgtcgttactctgatggtaaaacgggttggaaacgttcgttgttgtttatacagttcacaggtgtctcctttgttttggggctgttgctggtaacgctcctgcaatacaaccatctgatgagccgcgatatgggaataaacgttccgggactggttcaggcaggaacctggttgccgaaagaaacggtagagcatgtcaccgatgaactgcgtcgccagcctacggtagagggagtggctgttgccacaagcggagtaatcggacagtactggacacgcggactgatgagtaatgacggtaaaagaatcgctacacttaactttaattattgcagttataactatcccgaagtaatgggaataaagattatcgaaggcagcactcttaagaaacaggacgatttattggtgaatgaagagttggtacgtctgatgaaatggacagatggggcggtaggaaagaaactgaatgatatacagggtacgattgtcggtgtcttccgggatgtccgcaactatagcttcttttcaactcaggcacctattgtcttgataggatcggagaatgccaatcatgtatttgatgtccgtttgaaagagccgtatgatgaaaatctgaaacgtctgaacgagtttgccgataagacatttccgaatgtagccttgcatttcagttctgtagacggtatgataaaggatatatacaagagtgtatatcgtttccgtaattcagtctggatcacttcaagctttattctgctgattgtaataatgggattgatcggatatgtgaatgatgaaacgcaacgtcgaagcaaagaaatagccatccggaaagtgaatggagccgaagcctctcatattttgcgtctgttgatacgcgagattctgtatgtctccgcttcctccatattgattggtaccattgtttcctatttcgttggaaaggcatggcttgaccagtttgccgaacagatttatatgaacccgttattgtttgtgggtacggcgctgtttgtcttattgctgatcgtagtttgcgttgtgttgaaagcgtggcacatcgccaatgagaatccggtgaaaagtataaagagcgaataagaatattattatcttttaggcacggattaacgcggcttttatgagatgcattcattgcagaagccatattaatccgtgtattcgtgcctaaatatttttcatactgatatatcttttagcatagcgtcctttttgctttattccgccactttatccgctatcggatgttctttcgatactttctttatataaatcatcagactgataactgccgtaataaatgctaaagagtccgataccggcagactgatccatattcccttcagtccccaccaatgcgggaataacaacaggcaaggcagcaaataaagcaactgccgcgtcaacgaaaggaaaatacttatttttactttgcctatactttggaagaagttaccgattacaatctgtgctcctacaaacgggaacataagtacagtcaaccgaagaccgtccaccgcaagtccgattaactcatcactatccgtgaagactgccgatactgcatgagggaaaaactcgcaaatcagaaagccactgcttgtaatcactacaccggaaataattcccagctttagcgtctgtttcacccggtctatcttctgtgctccgaagttgtagcctacaatcggctgcatgcccatcgtcagtcccagtacgatcatgacataaagtgttagcaaccggttgatgattccgtaagcaccgatagccatgtcgcctccgtgttcctgcaaactattattaatcacgataacgatggcacaagcacagacattcatcagaaaaggagacatgccgatagcgaaaatactctctacaatccttcctttcattttccagacctttccctcaaaatgcaccgtactgtctttcttgcagaagtggctcaccacccataccattccgatcagctgtgagatgaccgttgctgtagccgctccccgcattccccattcaaagtgaaagataaagataggagcgaggatgatatttgctactaccgttaccatagaagtaagcatcgctttcttcggatatccggtggcacgcatcacattattcaggccgatcatcgtgtatgtgatgggagttcccaataaaatcacctgcataaaactccgtgcataaggcagtgtgtcgggactggcaccaaagaaagtcagtatatcatcaagaaagataaaagacaggataccgaaaaagaaagaatttgtgatacagagcatcagcgtatgtgacagaatctccgtagcccctttcatatctttctgtcccaggcgaatagaagcgatggtagaaccacccgccgaaacgagtgtacagaaagcaacgaccagattcatcaaaggaaagctcaccgccagtccggcaatagccatcgcacccacaccgtgaccgatgaagatgctgtcgatgatattatagatagacgtgattgtcatcccgatgatagcgggaatggagtattgcaacagtagcttaccgatgctttcttttcctaatatgtgcggatcgtttttgctcatgcgctcgtatggattgttggatgaaaacgaatgttacgtttttttaagtggggcaaaggtacgaattatttgcctgattcgatgattattcggaactttgcacaattcaatacacaaggtttaacgttttaggtaaaaagaaagattacgtatggatacaacaaagacaattgcggcactgttcgattttgatggtgtcatcatggatacggaaacacagtacactgttttctgggatgaacaaggacgtaaatatctgaatgaagaagacttcggccgtcgcatcaagggacagacgctgacccagatttacgagaaatatttctcggacctccccgaagctcaacaagagattacggccggactcaatatttatgagaaaagcatgtcctatgagtacatccccggtgtagaagcttttattgccgatcttcgtaaacacggagcaaaaatagccgttgtaaccagctccaacgaagagaagatgcaaaacgtctataacgcccatcccgaatttaaaggaatggtagaccgcatcctgaccggagaaatgtttgcccgttctaaacccgctcccgactgtttcctgctcggtatggaaatattcggtgctactcccgaaaactcgtacgtgttcgaagactccttccacggtctgcaagccggaatgacttccggtgccactgttatcggtcttgccactaccaatacaagagaggccatcaccggaaaagcacattatataatagatgacttttcggaaatgacctttgaacacttattggccttgcaccgttagttctttcttattatcttcttaatttgtctttttggccgccttctcattaacttggggaggtgtttgaaaggattttttctttttctttctcacttatgaaagaaatgttataactttgccgcaatttttgatggcgttgacgccttatttaatttctagttttaatttaaaatttaagaaacatggctggttatatatcagatgacacaagaaaggtgactactcatcgcctggttgaaatgaagcaaagaggcgaaagaatatctatgcttacttcttatgattacacaatggcacagatcgtagatggtgcgggaatggacgtaattttggtaggcgactccgcttcgaacgtgatggcgggtaatgtgactacattgcctattactctcgatcagatgatttatcacgctaaatcagtagtacgtggcgtaaaacgcgctatggtcgtagtagacatgcctttcggttcctatcaaggtaacgaaatggaaggtcttgcttctgccatccgcattatgaaggaaagccatgccgatgctttgaaactggaaggcggagaagaaatcatcgatacggtgaagcgtatcatcagtgcgggtattccggtgatgggacacttgggactgatgcctcagtctattaataaatacggtacttacacggtacgtgccaaagatgacaacgaagctgaaaagctgattcgtgatgctcatcttctcgaagaggcaggctgctttgccatcgtactcgaaaagataccggctactcttgcagaacgtgtggcttccgaactgacgatacctattataggtattggtgccggtggtcatgttgacggacaagtattggtcattcaggatatgcttggaatgaacaacggattccgtccgcgcttcttacgtcgttatgcagacctgtatacggtgatgactgacgctatcagccgttacgtatccgacgtgaagaattgcgacttccctaacgagaaggaacaatattaaaacagtatatggcagttaaattgtggacagttcattttatgcggatatgcgtagctaatttgctgttgtttatctccttgtatatcttgtttccggtactttccgttgagatggcagaccgtctcggagtaccggtggcacagacaggagtgatctttctttttttcactttaggaatgttccttatcggtccgttccatgcttatctcgtagatgcttataagcgtaagtacgtatgtatgttctcttttgccacgatggtggcagcaacggcaggatacgcctttgtgacgaacatcacggaacttatcttgttgagcaccgtacagggactggctttcggaatcgctaccaccgcaggaatcacacttgccattgacataacgaacgctacacttcgcagtgccggaaatgtcagtttctcctggatggcacgtctggggatgattataggcattgttctgggtgtctggctttatcagagctattcctttaaaaatctattgtccgtatcggtgattaccggagcagcaggtgttttgatggtatccggagtgtatgtgcctttccgtgcaccgattgtgaccaggctttattcattcgatcgctttttgctgttgcggggatgggtgcctgccatcaatatgattctgatcaccttcgttccggggttgttgattccgcttgtacaccgtttccttaacgattccgtatggggaagcagtggaatccctataccgttctttgtcggtacgggcatcggatatcttgcctccctgctgctggcgcgtctgtttattctgaaagaaaaaactttgcggctggtgctcgtcggcatcatactggagattgtagccatcactctactggcctccggctttccggtaggcgtaccttccatactcttgggtttgggactggggttggtgatgccggaatttctggtcatgttcgtgaaactgtcacatcattgtcagcggggtacggcaaataccactcatctgttggccagcgaagtcggattcgcatccggaatagctgttgcgtgttacttcgatttggaagcggataagatgctctatacaggacaggtggtagctgtgattgctttgattttctttatactggttacatatccatattataagagaaagaaagtgagataaatcgtttcgcactatttccgtgacatgattgtctatcataaataaaaagactggcgttatcctgacggagataatgccagtctttttattaaagacctgtcaacagatttgctgttagcatagagtgcttagtttctgcttacctgtttaactcccttcactgtccgcagctttttgatcagcgcttccagtcgtccggtatcacccaccatgaccgtaagcgttccggagaatagtccgtcgttggaattgattccgatggaccgcagactgattccattctctttggaaatgatggaagtaatattggtaacaatgccgatatcatcatgacctactacgcgcagcgtaatcggatactgcgtaccgactgacttgccagcccaacgcgctttaacaatccggtatccgaaccgttcgcgcatctgattggcattcggacagtctgcccggtgaatcttgatacctccgctcacggttacaaatccgaatacatcatccccatagatcgggttacagcatttggccagtttaaattccagtcctttcagattctgatcaatgactagtacatcctcttttgaactaggttcttcctgagttgcctgcaaattatatccttcggcactgcgatacacaatctcatcgtgcgtgtcattgtcccgtctctgctgttcaaggtatttgtccagaatgtcgttgacatccaatgtctcgtcagcaatcttctgataaaactctgtcacatttttaaagcccagccgcttgatcaggcgcatcatggtggcttcgtcatactccatcttccggttcttgaacttccgttccagtgtctctttggcgaaatcgtgctggcgtgctaccatctctttgagtgcctgccgtatcttggtgcgggctttggaagtcgtcacgatgttgagccagtcctgtttgggagtctgggtattcgacgtcatgatttctacctgatcaccgctgttcagtttctgtttgagctgtacatttttgccgtttactttcgcaccgatacacttgcatcccagtttgctatggatgtggaatgcgaaatcgagcacagtagctcctttggcaagtttgaataagtctcctttaggcgtgaatacaaatacctcatcctcgtagaggtccattttgaactgatccatcactttcagtgagtcgttatccgcattttcaagcgcttcacgtaccgaagtcagccattcgtccagtcctgtttcccctttgatacctttgtatctccagtgtgcggcgagtccccgttcagcgatctcgtccatccggcgggtacggatctgtacttccacccatcttccttccgggcccatcacggtaatgtgcaacgattcataaccgttgctctttggaatcgagagccagtcccgcagacgtttcgggttcggctgatacatatccgttacgatagaatagacctgccagcattcctgcttttctttggccgggtccggttcggaatccagaatgatacggatagcgaacaagtcatagataccttcaaacggagtcttctgcttctgaatcttattccagatggaatggatggatttggtacgtcccttgatgtcgaacttcagtccggcttcctttaccttcttctggataggatcgatgaaagaagcgatatacttgtcgcgggatgctttcgtctcgttgagcttctcctttataaagtagtaggtttcccgctgcgtatatttcagcgacaagtcttccaattccgatttcagcttgtaaagtcccagtttgtgggccagcggagcatataggtaagcagcttcgttcgctactttcacccggtcttcctcgttgcctgtatccttgatttggcgcatgatgttcacacggtctgcgatcataatcaggatgacgcgcatatcttcggcaaaagagagcaggagattgcggaaattctccgattctatcgccggacttttggagtacagttcgtttgttttcaccagtcctttgatgatactgcctacatcttcgccatattcggcattcacttcttcgatagacaggatatgtgccttcactatttcgtgaagcatgatgccgaccagacacgaacctttcatgccgatttcttcggctacgataactgccgtttgtaaatctctgatgacgggattcatcccgaagttattgcgttgcagcccgttacactgggcggctttgataagatgtttctttaatttttggcaatccctccagaaaatcgtatctccggcagattgcaacagatgcctgtagagtgaaaaaagctccttcttttcctccgatgtaaaaaagtcgtccatattcaatcttgttaattcgacgtaaaattactttttttcccggttattcggcaagaagtaaataacattttgtatttttgggcatcaattaataaaaatagatattatgataacgacacaggacaaagagttgcttgccaagaaaggcatcacggaggcgcagatagcagaacagctggcttgcttccagacgggttttccttatttgaaactggacgctgccgcttccatagaaaaaggcatattggctcctgacgcagaagatcagaaagcatatctggctgcatgggatgcttataagaatacggataaaatcatcgtgaagtttgttcctgcttcgggcgctgccagtcgtatgttcaagaatctgttcgagtttctgtccgcagagtatgacaaacctactacaaagtttgagcaggcattcttcgacggaatcaaggattttgctttctatgacgacttgaatgtagcttgtcagcgtacagccggaaaagatattccggggctgatggaagaaggtaattacaaagccgtagtagctgcccttctcgaaactgccggactcaactacggagcacttccgaaaggtctgctcaaattccataaatatcccgaaggttcacgtactccactggaagaacatcttgccgaaggcgctatgtatgcagccggaaaaagtggtaaagtaaacgtacacttcactgtctctaccgaacatcgagaactcttcaagaaactggtggaagagaaagccgaagcattcggcaaacgttacggagtagactattacatcaccttctccgaacagaaaccaaataccgacaccatcgctgccgatatggacaaccagccgttccgagacaatggtaaactcctgttccgtccgggtgggcacggtgcactgatcgagaacctgaacgatctcgacgctgatattatcttcattaagaatatcgacaacgtagtacccgataaactgaaagccgacaccgttacttataaaaaactgattgccggcgtactcgtgtccttgcagaaaaaggcattcgaatacctcgaactgctcgacagcggaaagtatacgcacgagcaaatcatggaaattctccaattcctgcaaaaacaacttttctgcaagaatcccgaaacgaagaacctcgaagatgccgaactggtgatctacctgaagaacaaattgaaccgtccgatgcgtgtatgcggtatggtgaagaatgtaggtgagccgggtggcggtccgttccttgcttataacagtgacggaactatctcactgcaaatcctcgaaagctctcagatcgacatgaacgatcctgccaaaaaggaaatgttcgaaaagggtacgcacttcaatccggtagacttggtttgtgccgtacgcgattataaaggtcacaagttcgacctggtgaaatatgtagataaggcgaccggcttcatttcttataaatcaaagaacggaaaagacctgaaagcgcttgaacttcccggcttatggaatggtgcgatgagcgactggaacacagtattcgtagaagttcctcttaccactttcaatccggtgaaaacggtgaacgatctgttgcgtgaacagcatcagtaggatttaaaacaagattgggtccagtctgtcattcttcctcctccgcggtcgtccgaatggcagatacagacaaatgtctctcccaatcattataattactaattaagtaaaagcaaaatctgagaggctgactaaaaagtcagtactatcttaaatctcctccttcccgaaggaggagatttaagatactgccgacttttagtcagccctagtgtagatacaaccgactttttagtcactacttataataaaaagagtatttaggatgaatcagatagaaaagatcattgacattgcaacatggaacagaaaagagcattttgaacatttcagcgcattcgatgatccctttttcggagtgacagttcatgtagactgtacccgttcttatcaggaggctaaagacaaaggcgtctccttttctcttttactattacatcgtatcatcactgccgcaagcaaagtcgaggaattccgttaccgcatcgagggcgacaaggtagtctgctatgacagtcttcttcccgaagcgacagtagggcgtgccgatcatactttttcttttgccgcctttgagtacgatcccgatgagctcacttttatccgtaaggcgaaaaccgaaatggagcggctgcaagccaccaccggactgaacaaaggaggaactttccatcccaacgccattcactattcggctgtcccatggctggcctttacagatatgaaacacccttcgaacatgcgttcgggcgatagcgtccccaaaatatccaccggaaaatactttcgggaaggagagaagctgatgctccccatttccgtcacttgtcatcacggactgatggatggttatcatgttgccaagtttattgagacccttgatttatgaaaccgtcaggatctggagactaacaatgacggcactatgagaaacaagaccctgagatggaaaaccatcgctctttgttccatcatgttttgcctgccgaagactcctttggcagggcaggagtcttctggttttatccatcgtttgggaatggaagcccgtccgcaatatgtatttcctaccaaccccttcctgcaaggagagaacgaacgctggaaaccgattcagatatcgtttgccgcccacttgaaatactcgttcaagtttcgccccaatacttgtgccgaccgtatttacggtggagcttatcagggtatcggcgtatcccttaccacctttggcgataaaaaacagttgggcgatcctttctcattttatgtgtttcagggagcacgaattgtccgtttctctccccgtgcctcgctcaattatgagtggaatttcggtttgtccgccggatggaagccatacgacaattattataattcctataatggtgcggtcggttcacggatgaatgcttatatcaatgccggagtttacataaactgggcgttttcccgttacttcgatctgattgtcggaggcgatttcacgcacttctccaatggtaacactaaattcccgaatgccggaatcaatactgccggagccaagatcggactcgtctacaatttcaatcgtacggaagaagacctctcgaaatcactctatcagcctgtcaccacccgttttccccggcatatcagttatgatgtcgtgctgttcgggtcatggcgtcgaaagggagtgtgggtaggagagaagcagatcgcatctcccaatgcgtatcccgttgccggattcaattttgccccgatgtataatctgggttataagtttcgcgtgggagcttcactggacggtgtctatgatggcagtgccaatgtatatagggaagatgtaattgtagaatatgggagcagcagttctaaacgtgagttcctgaaaccgggcattcagcatcagctggccttgggactttcgggacgtgcggaatatgtgatgccttattttaccatcggcgtcggtatgggagccaacgtgctcagccgtggcgatatgagaggcttctaccagattcttgcattgaaaatagccgttacccgcagttcctttcttcacatcggatacaatttgcagaacttccagacgcccaactatctgatgctcggactcggtttccgtttccacaataaatatcctaaggtacgtcattaataaaaagaaatatactaattttgcatcactaacataaaacactcaaaataatgaagaaaatattgttactcggttccggagagttaggaaaagagtttgtgatctctgcacagcgcaaggggcaacacgtcattgcttgtgattcttatgccggagcacctgctatgcaagttgccgatgaatttgaagtcttcgacatgctggacggtgaagcattggaacgcgttgtagaaaaacatcatccggacatcatcgttccggagatagaagccatccgcacagagcgtctctatgactttgaaaaagaaggaattcaggtagtgcccagtgcccgtgccgtcaacttcacgatgaaccgtaaggcgatccgtgaccttgccgccaaagaactcggcttgaaaacagccaactatttttatgccaagacactggacgaattgaaggaagcagccgccaaaatcggtttcccttgtgtcgtcaaaccgttgatgtcttcttccggcaaaggacagtctctcgtcaagagtgccgacgagcttgaacatgcctgggaatatggatgcagtggcagccgtggcgatatccgcgaactgatcatcgaagaattcatcaagttcgacagtgaaatcaccctgctcaccgttacacagaaaaacggacctacgctgttctgtcctcctatcggacacgtacagaaaggcggtgactaccgtgagagtttccagcctgcacacatcgaccctgcacacttgaaagaagccgaagaaatggcggaaaaagtaacccgtgccttgactggtgccggactttggggagtggaattcttcctgagccatgaaaacggagtctacttctccgagctttctccccgtccgcacgatacgggcatggtgacattggcaggaacgcagaatctgaatgagttcgaacttcacctgcgtgccgtactcggtctgcccatccccggcatcaagcaggagcggatcggtgcaagtgccgttatcctttctccgatagcgagtcaggaacgtcctcaatatcgtggcatggaagaagtgacgaaagaagaagatacttatctgcgcatcttcggcaagccgtttacccgcgtcaaccgtcgcatgggagtcgtactttgctatgcaccgctgaactccgatctggatgcgttgcgtgataaagcgaaacgaatcgccgagaaagtagaggtatactaaataaaaagaatgagagtgagtcaaaagcaaaaggatagtgaatattgcttttgattctctctcatcatctcctcttatataactaataatgaaaaacatgaaaaagactaaactattggcagctactgctatgctattactgacttcctgttcacctaaagtggtcactaacattgtaagaacctatccggatattattccggcagattcggtctatgtcatcggtttgggagaaaaagtgcccaatacagccgagactatcgggcgtgtatcagtagtggatcggggtacttctacgaattgccgttatgatcaggtattacatcttgcacaagaggctacaggaaagattggtggcaatggactcgccatcactaatcaccagaaaccttctttttggggaagttcctgtcatcagatttccggactgatgctgcggttgtcggataaaagtgtggatacactgaaaacaaatcctgtacaagacgtaatagatctcgacctggttattgctaaagactatgcagaaagcagaaaagcgcctgccaacacgtttgaagcgagcttcggatatggatgggtgatcagcaagatttatgatatcaacggtagggcgttagattcgaaaggaggagttgaatggaagctcgcttacgaacatgtctggaacggtgggatgggaatcggacttcaatatgctggtttcaagaagtcattctccggtggcgacatgatgttctcctatatagctccggagtgggtaagccgtacaaaatttgacagatggatcttaaaatcaggcgttggtgtcggcgttttcctttatcatgatcctttctacaatgctgccggattcggccttcatgccacattaggatttgagtacatgctttcatctaattggggactcggcttgactctgaacgggatcggtggaagtatgcccaaacaggactggatgctgctgaaagaagacgaacgttgtggaatcacccgctttaacctgctgggtgggctgcgctactacttctgatgataactccttctttctaggaagaatatcaatgtttatactgtacttagatttataaataaagagagagggcagaagtctgaaactgcatcctctctctcgcgtttataacattgttatttctttgatcttacagactcatcgcattaccgcctacaatacccagcactgccgaagccaccgcgatgactactttcaaaatggtatcccaaagggatctcttgactgccataactttacacacctcctttccgactctttacatgattgattactaagtgaatcattaccgaatgaatgattacaaggcataactttcctcctttacctcaaagcacgggcacgccttgatccactcctccggctcaatctccccgttcccgttgcgatccggcgacaagtcgcgatgaccgcacacccggcaaccggggaatctctcttgcaactgatgcaccagcagccggagcgctgcccgctgttccggtgtccgtgtgtccgccgggcgtccccggcagtccaggccgccttcgtagcaaattccgatactctccgcattaaaacctttcgcatgtgccccgatccgttccaccggacgggtaagatgcgttgttccatctttgcggatatagtaatgataacctgtcccgttaaatccccgccggcggtgcatcgtatccagatcaaaagccgtcaactccttgtctgcccgcgttgcagaacagtgaatcacaattaaatgaatcttcctcataaagccactaattctaactatcaatccctcgtacattgattaccaactctcaactctccacttcttacactgtcgggtccggagcttcctcgtcgcctccgccgccttcgtttccaccgccaccgggggtgttgtcctctcctgatccgtcgcctttcttctttttcggggcttcgaggtcgagaaactcgatcttgtcaccggcacgggtagacgttaggttggggcggacgctgctggaagggcggaagttgatctgtatagatttgatattcttcaccgtacactcttctttcgtggttgctcccagcgtatgggcggatagactgaatacaccgaagtctctgatattgaccgattttccgtcgaagagcgccgctcgcattgcctccacatagttggtcagtacgctttggatgtcgcccagggagagggaactcttgtctttcatgatgtaggcgatgccgtcaaggtctacactttggcccatcgtcaccagttgggggtggtacttcagcaccccgtcaatttttcgcgggtctttacgacccattcttttaaatggtattgccatgatgataaattaaagatttagaaaaatataaattaataattactgattgctgtcactcgatcagtgtcgggagagagaatgagctctgtttctttctttcgatgtgtcaaaggtagcctattcttaagccatgagaatacgtactttatcgtacttcgtcgtactttctttcagaatgtatttactttctttctgattgattttattttacttgtttgcttgtgtgcgcaaatatgttttagtatatttgaagtacgaaagaacttaataacaacgatatgaaaacagaaaaagaagaagcggaagaagaaccgtttgtcatccgtccgtatttgaagtcggagctggctcacaagtacaatccacatttgccattgatttatgccatgcagaaactacggggatggatcagaaataataaagaactttatgacgctatgtatagcggtggagaaggaaaaaacgatcatgcttatagcagcagacaggtgaggctgatcgtgaagtttctcgatgagccgtgaatctgtttttcgatgagtcgtgaatctgtttcttgataagtcgtccgtctgtaaggaagaaacaaattagctattagcatatcgaaattagctattagctaatttgtttttgctaatagctaatttcgatatgctaataagacttattgtttttttcttgtgacaatgaagtaaaagtcacgaatttcccctttcaaagtccagtaaagtccagaaagtccatattagattttcagaatatacgaaccgtgacctaacttgctgattctccctgctttaatgcctttattcaataagtagtaaacggtgcttcttgagaggttcaattcctctcccaaagcacatgcttctttggctgaaaaactctttttgagtttcgtcagaagtcgcgagagattatcgggcgattgtaatggtttcgtatcttcggcagagctttttaccgaagtactgaccagtttactatgttcgaagcaacacagcacgatggcgagcgctgctttgaaatgcgcgtccgagcagtatacttcgggtgtttccattctcatggttcccttgtcgatggcggagaaaatgcagcagatgcgtgccgttatcactccataacgtttcaccacccccagcaggtcatcattacctaactggtccgtatctttgagcagttgcgtgaatacccggttgaattcttttttctgtgtatctgtcagctttacttccgtaggagaatctttcagaaacaatgccatctgtgcgaagcgcatggacaactcgttgaagagatcgtccgcccgcaccttttcctccgcgaacacatcctgccatgctgccggaagtctgaaagtattgatcagaaagcggttgtacagccctgtctccatggtcgggatgaataaaatgaggctggatggagtaccggtgagaaaagccgacagggagggatattccactttcagcggatgtcgtccgttgatcttgtaggacgaactgatcagttcgtgctcgaatgccttgcagaggatatcgtcgaagtgtccgtaatcttggttgcgggctgtgctgacgctgctggcttcggtactggtgagcaaggaagaacaactttggttgttgatgaggtgagtgatgagctgtgcacggctgatgtcggcagggatcagcggaaatgccagcttcggctcctccggttcgtccggcaggttggtggcggcagtattctttttgcgtatcgcctgcaaggagagggtatagtccctgagtgctttcttgtattccttttcgatcttcagactctgcttctcccaatactcacaatagtgcttgtgcaggcgtatgccatagccgatgaggttcttgttggcaccggaggaagctacgacgatacagtagatattgggctgataattccgtcggttgtagcggatgcttacactggggagcatgctgcttatcgtggtaatacatgacaacaagagtccgtccctttcacgctcgtctcttgcgatggagacgcactccttgaagatggcgggaatgagatcgtaaatttcgtcaggaaaggtcggagtctgctctctgagctcttctccgatgatttcatcctccttttctgccggattttcgttttctgaaaatcctataacggacttttggactttactggaatttgaaggaggattttcgaagctttccgtctctgccgcagtcattacattctggtaagctgattttacagtacgtgcgatttcgggctcacggaagttgtcttcttccaaggtgcgaaccaattcggtggtcagttcgttacggtcgatgccgcgtttgcaggcagcgcagctgagccggaaaacggttccgttccggtcgcccgttgcggcagggtagagggtgaggtaggactgtacgaagggagcggcggaaatccggttacccggcatcgcaggcggatgtccgttggagaaagaggtgggagtgcaggtggtgcggggagcggaagtgacgggagcgtaggtgacgcgcggagtgagtgcaccgttcggcagaaagtcgttgacggcctttgcgtcaccgttgtagtatgcgtccgggtcgtatgatccgaagcagggatgggtgatatccttgcatttcccgtcgttctctacgccgagaacggtggaaacgagctttgcagtcgcttcataaatggcaggataatcgtttactccatcgatatctatacgaatgaacaacttaacaccacgtccggagatgctgataaacgctcccaggacgtattcgagcaggcaggcacgtacgaaaatatcctttgtctgttcgtccgtatggtcgatgtcgatgcagagtgcgagtgacagggaggtaaggttgttttttgcgtgtccattcttgcatatgcctgcggggatgacacatgccatgctgtctttgatggtttgcgcgtcgtgttttcggtcttttgccagacagctgcggtggccttccgtaggcactttccaatgtccgttgcgtaccattgcgaaaaaatcttcaaaagttatagtcgtgggagttttactccaagtgttgataaatagtgacacttggtacatgtgctttctcatttgaaatataatatataagttgccggaagcgggtggtgtagttatcacgggcttccggctgcgaaggtaggaacttctctttttttaccaaatcgattattaggactgatttctgttccaatcgtcccattggtctttcaccatctcctccagttttcccagacagcttttataggctatggcatgcttcggagagcgttcgtcgcggatttcgatgcaatggaacagccctttcagtacatccggacagcgtggcatcagcggtatctgcttgatgatccgttcttctttgttgcactctttgatgtctttatcctgtacggatttccaaagaaactgttgcttgaaaatctcttttgcaaggatttcaagtaattcattttgagtaaataagatggggaatccgggtaggtgacattgagatatatcatctactgtcaacggattgcctgctttgtctaccattgttacgtttaacgtaaagttgccgattttttcggcaaaagccaaaaggttttttttaccataatttttaggattaataatgcagcaaatttcttctttttttatcagaagagtgttttttgcttcttattttttctgctgacatttaacaaagtggcaaaattaaggaatttataattttcttgccgaaaacttttccgcttcaggcaaatggggagtgtttaataggatgtacgtgcccggatataaaactagttgcatatgctactattttatcactcgtttaagtgtttgaatattaccgttgaatgggaaaacttgatattaagtcatagttttaatgatattttataactaacaggcttattttactatacaatcgtaattggaatgttccgatattggtctgtttgtagtctttgttggcctaacaagtgttattgaacgacaaataatgaaaaaggaagaacaacgatgctaatttgtttctacatttgcgcggttgtttatttaactattttgttaaaaagaaatcgggcatgattgaacaaaagctaaatttaactgtttactatagtagattaaagtagataaaacgcgaaacgttccttgtcatgctactaaaattcgataggtaaagaaagaataatataaataaagattgcttatgtcacagattatcggacatatctcacaggtgatcggccctgtggtcgacgtgtactttgaaggtacggacgcagagttaatgctgccaagcattcacgacgcactggagataaagaggccaaacggcaaaatactggttgtagaagttcagcaacacatcggcgagaatacggttcgtaccgtggctatggacagcactgacggacttcagcgaggcatgaaggtgtatcccaccggaggcccgatcacaatgccgataggcgaacagattaaaggacgactgatgaacgtagtgggcgactctatcgacggtatgaagagtctcgaccgtacaggcgcatattccatccaccgtgatcccccaaagtttgaagatttgacaactgtgcaggaggtactcttcacgggtatcaaagtaatcgacctgctggagccgtatgccaaaggtggcaagatcggactctttggcggtgccggtgtaggaaagaccgtacttattcaggaactgatcaataatattgccaagaaacataacggattctccgtatttgccggagtcggcgagcgtacccgtgaaggtaacgacttgctgcgtgaaatgatcgagtcgggcgttatccgctacggcgaggctttcaaggaaagtatggagaagggcgactgggacctttcgaaagtagactataatgaactggaaaagtcgcaggtatccttgattttcggacagatgaacgagcctccgggcgcacgtgcctctgtggcattgtccggactgacggtagcggaatctttccgtgatgccggcaaggaaggtgagaaacgcgatatcctgttttttatcgataacattttccgtttcacgcaggcgggttcggaagtctcggctctgctgggacgtatgccttctgccgttggttatcagccgacacttgccacggaaatgggtgcgatgcaggaacgtatcacttccacccggaaaggttctatcacctccgtacaggcagtatatgtgcctgcggatgacttgacggaccctgctccggcaacaaccttcagccatctggatgcaacgaccgtgctcgaccgtaagattacggaattgggtatctatccggctgtcgatccactggcttctacgtcccgtatccttgacccgcacatcgtgggacaggaacattatgacgtagcacagcgcgtgaaacagattttgcagcgcaacaaggaattgcaggacatcatctccatccttggtatggaggaactttcggaagaagataaactggtcgtgaaccgtgcgcgccgtgtgcagcgtttcctttcgcagccgtttgccgttgccgaacagtttacaggcgttccgggcgtgatggtaggcatcgaggatacaatcaaagggttcagaatgattctcgacggtgaggtagacaacctccccgaacaggctttcctgaacgtgggcacgattgaagaagcgatagagaaaggcaagaaattgctggaacaagcgaaaaagtaatcgaaacaacattccatgatgaaagaattgcatttaagtatcgtatcgcccgaaaagagcgtattcgacggagaagtgaagattgtcacactgccgggaacggtaggatcgttttctatcctgccgggacacgcgccgatcgtctcgtcattgaaagcgggaacgttgggttataccacgatggacggcgaggagcatacattggatattcagggtggttttgttgaaatgagtgacgggacagcttcggtgtgtgtctcgtaaggaagacgagatggataatatacagcagaaaaacacaacgacatggtgaacattagtaagactaaacggaattttatcgcactgaatacgctgtttgctatactaagcggagcagcgggagcagtgattttacacatagccttgccggggcattatttcggaggatatccgtttataccggtatatttctatatcttcggtttgtttagtatttatatgttcgatgcgtgtcggcggcatgctccgcagaagttgtcgctgctgtatctggcaatgaagatgataaaaatgattctctcgctgattctgctgctgatttattgtctggcagtacgcgaagaagccaaggctttcttgctgacgtttatctcgttctatctgttgtatctgatatatgaaacgtggttcttcttctcctttgaagtgaacctgaaacggaaaaagaaaaataagaataaaaatgaaacagttgcgtaacatagtagctccgatatttctgctctgcctgatgttggtagccggtctgccggtcttcgcgcagacacaggaagatgtgactccgcaggagcagaaagagaatacggtcgatgtgaaggagatcgtgttcggacatatcggcgactcatacgaatggcatattacgacgtggggtaaaacgcacattactataccattacctatcattgtttatagttctactacaggttggcatacgttcctttcttcccgtctcgctgagaatggaggcacttatgaagggctctccgtcgcccccgaaggaagtaagtacgaaggcaaactggtggagtataatgcagccggagagcaggttcgtccgtgggatatttccattacgaaggtgacattcgctttgttgttcaacagtgtgctgctgctggttatcgtgctgagtgtggcgcaatggtacaggaagcgtccgcagggagcattggcaccgggtggttttatcggattcatggaaatgtttatcatgatggtgaacgatgatatcatcaagagttgtgtcggacccaactaccggaagtttgcaccgtacctgctgactgcgtttttcttcattttcattaataacatcatggggctgattccgttcttccccggtggtgcgaatgtgacgggaaacattgccatcactatggtgcttgcaatctgtacgttccttgcagtcaacatctttggaacgaaacattactggaaagatatcttttggccggatgtgccctggtggctgaaagtgcctgtaccgatgatgcctttcatcgagttcttcggaatctttacgaaaccgtttgccttgatgatccgtcttttcgccaatatgctggcgggacacatggcgatgctggtactgacttgcctgatctttatctcggcaagcatgggacctgcgctcaacggtacactgacggtagcttccgtactgttcaacatttttatgaatgcgcttgaactgttggtagctttcatccaggcatatgtattcaccatgctttcggccgtatttatcggactggcgcaggaaggtgcaaaagtaaaagcagaataaacgcgaagagagagcaaataaataaacgagaaaataaaccattttaaaactgaaaattatgttactatcagtattgttacaagccactgcagcagcagtaggagtaagtaaattaggtgcagctatcggtgcaggtcttgcagtaatcggagctggtttgggtattggtaagattggtggttcggctatggaagctattgcacgccagccggaagcctcgggtgacatccgtatgaatatgattatcgccgccgccttgatcgaaggtgtggctctgttggcggtagtagtatgtctgctggtattcttcctgtaatattaaatagatatgtcattactattacctgatagtggcctgttgttctggatgtttgtcgcattcggggttgtgttcgtgatattagcgaaatacggtttccccatcatcatcaagatggtggaaggccgtaaaacctatatcgaccagtccttggaggtggcaagagaagccaacgcccagttagctcatttgaaggaagagggcgaggcgcttgtggctgctgccaacaaggaacaaggacgaatcttgaaggaggcaatggaagaacgtgacaagattgttcacgaggcccgtaagcaagcagagatagccgcacagaaagaactggatgcggtgaaacaacaaatccagatagagaaggatgaagcgatccgcgacatccgtcgccaggtagctgtgctttctgtcgatatcgccgagaaggtgctccgcaagaaccttcaggacaaagaatcccagatgggaatgatcgaccgtatgctggatgaagtattaacccctaataagaactaaggaagatggaagtcggagtactctcaatgcgatatgccaaagcgatgatcgaatacgctcaggagaaaggtgtggaggatagactctacaacgaattcttcacattgtctcacagttttcgtgtccagccgggactgcgcgaagtgcttgataatcctgtggtgtcggtaaaggacaagttggcgctgatatgtacggctgccgatggtaacggtgaatccagcagagagtttgtccgtttcatcacgctggttctgcgaaacaggcgcgaaggctatttgcagttcatcagcctgatgtatctcgatctttaccggaaactgaaacacatcggagtaggcaaactgattacggcagtcccggtggacaaggagacagaaaaccggatccgttccgcagcagcacatattctgcatgcccaaatggaactggatactgtgatcgatccctcgatagaggggggcttcatcttcgatatcaatgattatcggctcgatgcaagcattgccacgcagttgaaacgagtgaaacaacagtttattgataagaataggagaattgtataatgtctgaaaatataagagtaagcgaagtatccgatatattgcgcaagcagctcgaaggtattaacaccaacgtgcagctcgacgagatcggtacggtgctccaggtaagcgacggagtggtacgtatctacggattgcggaacgccgaagccaacgaattgctggagtttgacaacggcatcaaagccattgtgatgaacctcgaagaggacaacgtaggtgccgttctgctgggacctaccgacagaatcaaggaaggctttatagtgaaacgtaccaagcgtatcgcctcaatccgtgtaggtgaaagcatgctgggacgtgtcatcgacccgctgggcgaaccgctcgacggaaaagggctgatcggtggagaactgtatgaaatgccgttggaacgcaaagcgccgggagttatctaccgccagccggtaaaccaaccgttacagacgggcttgaaagctgtagatgctatgattcctatcggacgcggacagcgtgagctgattatcggcgaccgtcagacaggaaaaacttccattgcgattgatacgattatcaatcagcgcaataactttctggcaggtgacccggtgtactgtatttatgtagctatcggtcagaaaggttctaccgtggcttctatcgtaaatacgctccgtgagtatggagcgatggattacacgattgtcgttgccgctacggcaggtgatccggcagcgttgcagtattatgcaccgtttgcaggagctgccatcggtgaatatttccgtgataccggccgtcatgcgctggtggtttatgatgacctttccaagcaggcagttgcttatcgggaagtatcgttgattcttcgtcgtccgtccggacgtgaggcgtatccgggtgatatcttctacctgcactcacgtctgttggaacgtgcggcaaagatcatcaaggaagaagaagtggcacgcgaaatgaacgaccttccggagagcctgaaaggtatcgtgaaaggtggtggttcactcacggctctgcctatcattgagacgcaggcaggagacgtttcggcatatatcccgacgaacgtgatttctattaccgacggacagatattcctcgaaacggacttgtttaatcaaggtgtccgtccggctatcaatgtcggtatttctgtatcccgtgtaggtggtaacgctcagattaaggcgatgaagaaagtggccggaaccttgaagatggaccaggcacagtatcgtgaactggaagccttctccaagtttagcagtgatatggaccccattacggcgatgactatcgacaagggacgtaagaatgcacaattgctgattcagcctcagtatagtccgatgccggtagaacaacagattgctattctgtattgcggcacgcacggtctgctccacgatgttcccttggaaaacgtacaggattttgaacgcagcttcatcgaatctttacaactcaatcatcaggaagatgtgctggacgttctgagaaccggtgtgatagacgataacgtgaccaaggctatcgaagagactgccgctatggttgccaaacaatatttataaaatgaagacgctgtgtcaaaagtcaatagtaactgaactgggactgacttttgacacacactcattcttaattcttaatttaaatagttatggcttcactgaaagaagtaaaaaccagaataaattcggtaaagagtacccgaaaaatcacttcagcaatgaagatggtggcttctgccaagttacacaaggcacaaggagccattgaaaatatgctgccttacgaaaggaagcttaacaagattctgaccaatttcctgagtgccgaccttcctgttgaatctccttacatcaaggcgagggaagtgaagcgtgtggcaatcgttgccttttcttcgaatacgtcgctctgtggtgcttttaatgcaaatgtgattaagatgctgctgcaaacggtcggcgagttccgtacactgggacaggataatatcctgatattcccggtagggaagaaggtggatgaagcagtgaaacgcctgggattcgaaccgcaggagacttcaccgacgctttccgacaaaccatcgtatcaggaggcttccgaactggcacatcgcctaatggaaatgtacgtatccggagaaatagaccgggtagaactgatctatcatcattttaaatcaatgggcgtgcagattctgcttcgcgaaacttatctgcctattgacctgacacgggtcgtggatgaggaagagaagcaaaaggaagaagaagtacaaggaggtgaaatagcgaatgattacattatcgaaccttctgcagaggaactgatcgccaatctgatcccaacggtattgagccagaagctttttacggctgccgtggattcgaacgcttcggaacatgcggcacgcacattggcgatgcaggtggctacggacaatgcgaacgaattgatccaggatttgacgaagcaatataataagagtcgccagcaggctattaccaacgaattattggatatcgtgggtggctctatgcagtaaataaagattgcacgataacactattttgtgaatcggtattccgtttttaagctttgtccggctggtaattaaataatctatatatttgaaaattatttgagaggtgagattgttttgatgggaacaaaacaagccttgataactaacaaaacaaatatatagattatgacacaaaagcgattattcggcatttctggtgctattgctacggcagcattgattggtgggctgttggctggatgtatggaaaaagatctgtacgatcctaattatggaaaagaacctcttccggaccctagcgagtatttcggatttgaaacacgtggcgacgtgaaactctcagtaaactatgatgtccccggacttgtggctctacttgaagtgtatgatgaagacccgatggaagtagtggacaatgttccggtaaagaaagaaggggttgaagctttattcaaaattttcacggatggaaatggaaaatatgaagggaaaatgaatattccgacttctgtagagactgtttacttgtatacatcaagctggggagtgccccgatgcgtaaaactagatatcaaagatgggatggctagttttgatatgagtaaaaaggattcttctactgccaatactaaagcggtaacgcgttcttatgacttttcgaaaggtaacgtgccgtatcttatcaattccggtgctaatttgtattcattgtgtaagtggggagaaggaggaaatctcacctatatttataatagtcaaacaggaaagccagaccctattaataatggatatgtaacacctcaaaaacaagtgggtaatgaattgattggaaatcttgtagaacgtttaaactcttttttcaagccatccggaggttctgttgacaacgcttatttgtataagggatctgaaatcactaatattaatgtaacacaagagggaactacgttagatttggtctttcttgacagggacgcttcatttaataattcatttggatattattattataaaacaagtgatggagttagtaactctaatatgaggaagtatatcgtatttccaaatgttgctttttccgtatataatggagctttatctattttgaagtgtggagataaggtacgtctgctcttttggggtgaggatggtaaaccaagtgagaaatttccgaaaggatatacagtaggatggtttatatatgcagatgggtatcatcaaaatgagaatgaaattgacattacaaagccattaataacttctaatgggtattctaatggtggtttcgtatctgtaaaagatgaaaagagtggaaaaaccattattggtgtggaagatggagcaaacagaagtttttgtgatctactattttatgtagatgcttctccggaaagttctattgataatccgaacagacccaatatcccgagtgatgataaaccaatagaaaagccggatgcacaggagaacttaaaggggactttagcttttgaagatatttggcctgacgggggagattatgacatgaacgacgtgatcgtagaatataatcgtgccatatatttcaacacagaaaacatgataaataagattgtggatacatttacgcccacacacgacggagcgatgtatgataatgcatttgcttatcagatagatggaggacagtttggtaaagtgacttcagataaggatataaaagtggagagcgaaacgtcttctattattgtattcccaagtgtaaaacaagctgttaaggggaaagtgggtacatgtacgataaccagaacctttgaaaaggccacttttaataaggagaatctgaagatatataatccgtacattatagtaaaatatgcggcagggcaacagaaccggacggaagtacatctgcctaaatattcaccgacatcttatgctgacaaatcgctgataggttctagtaaggatgtctattacattgatcgtgacggagcttatccgtttgccatcgatattccgatgttgaatttcattccggtgacggagacgcataacattgatacggaatatccttatttcaagaattgggctgattcttggggatcaaaatctacagattggtacaagagatatcagtctcccaagaattaagaaacaaaaacaatttcgatatataactgtgacacgactttgtgttctgatttgatccggtcccggtgtacttcaagcgagaagaaaccgggaccttttttgtttatttgtatacaaatatttcgggagtaaagaaatgatgatgaaaataccggcttgattattgcttttccttacattcaatttcggtggttggaatctattcagtacctttaccgaaaattagaggaaacatggaaaataatcctgaactacaactagcttggcagttcattgaaaatacaggcacgcatctgtttcttaccggaaaagccggaaccggaaaaactacatttctaaaacgattgagagaacatacccccaagcgcatggtcgtattggctccaacaggaatcgcagctatcaacgccggaggggtgacgattcattcattctttcagttgtcttttgctccgtttgtgccggaaacgactttcaattctgccaagatgcactaccgtttcagcaaagagaaacggaatattatccgcagcatggatctgcttgttatcgacgaaatcagtatggtacgtgcagatttgctggacgctgtggacgcggctttacgtcgttatcgtgaccgtgaaaaacctttcggaggtgtgcagttgctgatgatcggcgacttgcagcagttggctcctgtggtaaaagacaatgaatgggagctactgaagaatcattacgagactccatatttttttgccagccgtgcactgaaggaaacggtgtatatgaccattgaactaaagaaagtctaccgtcagagtgatactttctttctttctcttctgaacaagatacgcgaaaataaagcagatgatgaagtgttgaacgaattgaatcgtcgttatcagcccggttttcgtccacggaaagaagaagggtatatccgactgacaacgcataactatcaggcccagcaggtgaacgaccgtgaactggcatcactgtctggacgggcttatagttttcgggcggagatagagggaaattttcctgagtactcgtaccctgcggatgaagtgcttacagtcaaagaaggagcacagatcatgttccttaagaatgacgtttcatcagaaaaacgttactataacggcatgataggcgaagtgatgagtgttgacgaaaaaggaatgtccgtacgtggaaaagacagtagtgatgtctttcagttgttgcccgaagaatgggggaattataagtatgtgctgaacgaagaaacgaaggagatcacggaagaaatagaaggtgtgttccggcaatatcccatccgtctggcgtgggctatcacgattcataagagtcagggtctgacgtttgagcgggcgattatcgatgctcgtaactcttttgctcatgggcagacgtatgtagcattgagccgttgcaagactctggaaggaatggtgttggagactcctttgcgtagggaggcgataatcagcgatagcattgtagataatttcacaagagatgtggaacagaataaaccggggagcaagcagttgaacgacatgcaaaaggcttatttctatgatctgttgaatgatttatttaatttctattcgcttgagcaggcttataagcggttgctccggatgatggatgaagagctttataaactttatccgaagttgcttgccgagtataaagaactggctccgcatctcaaagagaaggtggtggaagtttccaatcgctttcgtaatcaatatacgcgtctgattaacgagaatgaaaattatgccggaaatgaggagctacagcaaaggattcattccggtgctgcttatttctgtgaagcattgcttcctgttcgggtgctgtttgacaagaccagtatgcctcttgataataaagagttgcggaaacaactgaatgaacgtttgcaggcattggatgatgctttatggattaaagagtctttgttggatgcgatgcggacggagaaatttacggtaacggattatctgaaacggaaagcgaaagtgatgttgagtctcgaaggcgaaactgcttcttccggttcttccaccaaggctccgaaggagaaaaaagaacggaaagaacgcactcgcagcaattcaggaaaggtgaaaatagaagttccgacggatattctgcatccggaactttatcgtgctctgtcggaatggagaacggcaaagacgcgcgaagtgaatatgccggcttatgtgatcatgcagcaaaaggcattgatgggtattgtgaatctgttgccggatacaccagtagctttggaagcgataccttatttcggtgcgaaaggagtggagaagtacggacttgaaattttgggcattgtgcgcaaatatatgaaggagaacaaactggaacgaccggagatctttacttctgtttcgggcggagaggatgtacgtgaacaaaagctggacgcgcagcatcatgaggataagaagaagcagaaagagaagaagaaagattcaaagctggtgagttatgaaatgttctgccaagggatgactatagaggagatagccaaaacccgtgatttggtgacaggaacgattgctgctcatctggaacattatctccgcgaagataaaataaaattggaacaggtagtgacagcggacaagattaagaaggtccggacttatctggaaacccatgagtttatgggagtggtggctattaaagctgcattgggagatgaagtttcttacgctgatattcgctttgtattggcgacggcggggcattaaaaaactcattttaataaaaaaataatgtccgaaaagctactgacagaatgataggtcagatatgcttttcggacattatggtatgatggggtacagagttataagttacagaagaaagaaacgaatacaggcacgctgatatcgatcagaataccatgcaaaatagcgataggaatcatttcttttcccgaatatctgctgatggaaggtaataatacatccattgagttgactcctgccgctgaaatgggagcaagtttcccgaaatacttcttgataagcggtgtacccaaaagtgccatcatttcgcgaaagatattagtcagcagggcaatggtacccagctctgtagccaactgtattccgatggtcggttccttgaactgagtgatcaggatggaagacagcgaataataggcgaatccgcttcctactgccatacagtcgaatacactccattgacttagcaaaatgcttgccaaggcagaaaacaacaatgtgccggtaatggtacccaatggaatcagcagcattttcgggtgcaaatgtgagatgatcgctttcaggttcttattggaaccgatgctgattcctacttgcagcatcaacgcatatagtatatacatggaaacagtatgtgtgtcgaactggaatttattaaaaactcccatgatacagcctacacagaaaaatacgataacgatgagacttcctttcattgtttacctcctttcttgaaaaatagttgtaacacaagccgggcagccaacaagctccctaatacgccggatacggcaagaatgatcgcctgccatccaaacttaccgagattattcacaatcaggctattagagccaatggatactccaaggataaagagtaacaggaatattgtaagagaaattgtcttttcagtcttttgtaagatactccagttacgtaatccgtatccgataccgattcccaaaaacatggtagatataatagagaacatattgtaatatattttagttggttaggttaaacaattcataaatagcatagataatccccaaaaagacatacatcttattgacaatcagatggaaatactgtctgtgagtaacgaaataagtcaacaggcagttaggggtaagaatgagtaaggggaatttagatgaatccgctgaaccaatgtacatgcacgcaacatgacgtgcagaaattgggaatttccgcatgaaatataagggcgttatgtaattgtaatgtttgattcatcttctggttctttaattcgggtgcaaagataagaacttattgcatattttcaaaataaatatgcaataattaggatgggaaaggtagctgaaactaggaatagaatgtagtaaaaacttggttatgtagaccttaacctttatatattatgtgtttatatcatttttatttagttgccagttcgatgcctgagtcaaatttctatgttgtgtagagcacatacttttatttgtgcaaacaatctgattaataggatttgtcggttaatgtttccactccatgaggatgtctttcagctttcgtggctggtaaccaagtatagtccgggcttttgctatactcatcccactgaaacggggacggggagtagcttcttgcatttcttctgttgtggcagggtgaacgagcgaacggtccagcttcatgtagtctgctacctgaaaagcaatttctgcgatggtcaggcattcctcgccacagatatgaaaaattccgtttgcggcattttctaccaggtgttgtactccggctgatacgtcacctacataggtgggcgtgcgccattgatctgatacgacacggatttcttgtcctgcattcaaacgattcatcaccagttgcacgatgtttccatgttgtcccggcaatgcttttccgtagacaatctctacgcgggcaatagcatagttactacagatttcagtcactttctcttctcctttccatttggtgaaaccgtaatagttgacgggagcagggagacttttttctgtataaagctgtccggacttctcgtctatctttccgtcaaagacgaagtctgtagataaatgaatgaaccggcttttgtaactttcgcaaagatgtgccaattgttctactgccgtaacatttgttagccaggcttcttcgtgatgcgtttcgcaataatcggggacggataaggcggaacagttgatgactacatcgggttgtacgtctttaaaaagttgctttacgactgcttcatcccgtatatctgtggtgatgaaatgatagttgcctccattcttcggaaggatatccggatgcagggaacatcctgttaccttatattgtgccttgctcgacaggtcattcagtatttggcgtccggtgaatccattggcaccgataattattatattcttcatgggctgttttatagtcgttcgtttcagtcatatgagtttttctcagtcacatgagtgagtttcggttcagaaatggcttttctatatttattttcacaaaagtagaaaataattttagttacgcaaatagatttcgtagttccctttttcttttgctcttttgcgaatttaagcatatcattatcaggtccgatgcgcatgccggatggattggatgaagtaccgggagcttacaaagatattgcgcaggtaattgctaatgagcgggatttagtgaaacctttggtggaattggcgcctatggcggtgatcaaaggataaaattagctgacgagatgaggtatggacataaaaaaaggagcaacgccttgctccaacctttgttaaccttaaatctaatactatgaaaaacacattgcaaagatacggacttctgcgaactttgcaaattatccaagaaaaatagtatgttttataacattgattaagaatttgaattctcaattctatttttattaagagatttcctgatcttatcttttgttcttaatgagtagctgcataccatgctgtttcttctttttttgaggccagcgagtgcgtacttggatcggagattgtaataccggagaaggtattgattttcacttctcctctgctcatcgaatagaaatattctgtatttcttttgaatggcaccgtacgattgagctgttcgttgaatcgtgccactagagtttcatcagggcataattttgaaacatagtcaccatagtcaaagaagataaccggataatatccgtccagtctctgtaaagaactggttagtgaaggatcaaaagtatatcgatgattaatttctttcataatagttgccaggttatcaagttctgagcaatcagtgacagcgattgttccgcagggtgtgctataagtggaataaaaagagtaaaaaccgtcacagataccggcataatctactttcccaattagatactgacctatctcggcgtatggcataccatacgccatcacttcacttgtagatcctatcagataatcagtcacatctttgagagcgtaggctacttcaatgcttgacatatagcagtcgtcaaagagtatatattccattttaagtccggcattggatattcctttggcaagtgtggttatatcagtctgatattgggcatttaatcctccgaagtagcgtgtcattggtacattttcgtattcccagtgcattttggtacgaagaccgctacgtgatttagaatttgatacgggtatccatcccatgccatgacagccgataaccatcgaatagcgtttggtgggagagtagcgttgcacatcatttaggatggatgtgataccttctgctgtggtatatgcaggatctgtatagttctttagagttttatgcacactcttgccattctcataagcgagttcaaaaagagtggctttcgttgctgtggtacacatgaaaatgattatccgttcatccttcaagatattcttttcaactacactttcaaggtcgctgatgttctgatagaaattggatgtgagattatcagaccaggggagatacatgaataccgtttgttctgtaggtaccggaactggctcttccttttcgcacgaagtcatgccaaaagaaaggaatagtacgatgataactgatttaatcaaatggtgatatttccgctctgtcttcattgttttgtcaggattaaagttacttcttgatatataacgtaaaaagagcactttttgatttatatattcagaatataatctgaatgtatccttttcaagtgttactgcaaatctactgaaaaataatgtaattctactatatacgaaagtccaatagctcacgtatggacataaaaaaaggagcaatgccttgctccaacctttgttaaccttaaatctaatactatgaaaaacacattgcaaagatacggatttctgtgaactttgcaaattatccaagaaaaatagtatgttttataacattgattaagaatttgaattcttaattctatttttattaagagaaaagtcagttaggcatcttgaaatcattcggcaaacaaccggtgatcttcttaaacaggcggctgaaatattgcggattccggaaaccgagttcctgcgctatctggctgagtgttttatctgtatttatcaaccactctttagctatctcgaaacgcttgaactgaagatattctttgtacgatttccccgtttcatattccagcaaatcattgaaatatgcgggagaaagacgaagtactctgacgcactcctcaatagtgggaagatcggaggactgactttgtatagtattgaaatgatcatccaaaagacggtcaaaccgttcgataatctttttgttagcctcattgcgtgtgatgaactggcgttcgtagaagcgttcgcaataatcaagcagtagttcgatgtatttggaaatgatcttctgactatagcagtcgatacagcgttgcaattcttcatttattttatccagaagttctagtatgacctgcttttcacgtaatgaaacatgcagtgcttcttcgggacgataagagaagaaagtatagtcacgaatgttcgctccaagcacagtgccgcagatcaagtcgggatgaaacgccagtatccatcctttggaaggacatgtgttgtcactatccttcatactgattgactcgccgggagtcagacagagaagtgtcccgtccgagaagtcgtagtactgatgtccgtatctgtaggcttcacatttgcattcgctcaacagaatcgtgtaaaatccgaatttgaaatccgtatgggaggataaatcggcttttgaaaggtcgatgacactgaccagagggtgcagcgtcttactccccatgcagcaattacattgatgcacacttcctatcttaagtactttatctcccatgacgtaactaatatcctgattagtggagctgtttttagttctgttgcttatattcgtttggcgtacatccgacattcttcttgaacaaccgactgaaatgctgcggatactggaaccccagttcatacgcaatctggctgaccgtctggctgccttctaatatccgttctttggcaagttctatgatccggtgctggatatattcctgtgccgtttttcctgtttctttcttgatcaggtctccgaagtaattggaagaaaggcagactttgtccgcaaagtattttacagaaggaagtccttcggtaagtgcagtctgattctgaaaatactcgtccaataactgttcgaacttcacgatgatatctttattcgcctgattacgggtgatgaattgccgttcgtagaagcgcatgcaatagtcgagcaatagttctatattgcggacaatgagctgcttgctgtgtttgtcgatggcatgttccagttcgatttgtattttgtggatacagtcggtcacgatttccctttcctgttcggagagatgcagtgcttcattcacttcgtaagagaagaaattatagtgtttgatgttctgccctaaagaagttccccggattaaatcgggatgaaataaaagaccgatagattttgtacgaattggtgtctgcttgcggttatctatcccgataacctgtcccggagccatgcagacaacggttccttcctgatagtcataatacttccgtccatatctgagatcgccacattttgcgtctttcagaaacagagagtagaatccgatattcatacgatagtagtctaccgtctttgtcgctttcgaaaagtcgatcacgtttaccagcgggtgcaaggtctctagtccgaacagttggtcatactggtcaatgctttcaatttttgttatttcttccatacggcttacagttttgatctgtcacaaagataaagcttttaaatgtatctttctcattccggatttgcaaaacagtaatttgggtataagattcagtaatttgtatacaatgccggcgggcagtaggaggcaaactcactttttccagctaaatatcagcgtgtcggaaacaaaaaaacgggataatcacgggatgtgaatagtagaattaatatatttgttcctgcgaatttaaaaagacttgttttatgaaagcattattcattggaggaaccggtacgatcagtaccgatgtagtagaattggctcaacagagagggtgggagataacactgcttaaccggggctcaaaaaaactgccggaaggtgtgggcagtatcattgccgacattcacgatgaggaagctgtggcgaaagctattgcagatgaaagttatgatgtcgtagctcagttcatcgcttacacggcagaagatgtagaacgtgatatccgtctgttccgtaataagacgaaacaatatatttttatcagcagtgcatccgcttaccaaaaaccgttggctgattaccgtatcacggaaagtacccctttagtgaatccttactggcaatattcacggcataagattgccgccgaagaagtgttgatgacagcataccgtaccaccggtttcccgattacgattgtccgtcccagccatacgtataatggaacgaaacctcctgtaagcctgcatggaaataaggggaactggcagatacttaaacgtatccttgacgggaaaccggttattatccccggtgacggaagttccttgtggacactgacacattccaaagattttgccaaaggatatgtaggactgatggctaaccctcatgccatcgggaatgccttccatatcaccacagatgagagtatgacttggaatcagatttatcaaaccattgccgatgcgctggggaaacctctgaacgcacttcatgtggcttccgattttcttgcgagacatggcgggaactatgactttcggggcgaactgttgggggataaagccgcaacggtagtctttgataattcgaaaataaaacgccttgtgccggactttatctgtacaacttcgatggcggatggtttaaggcagtcagtgcaatatatgctttcgcaccccgaaacacagactcctgatccggagttcgattcatggtgcgaccgtgtagccgacgcgatggctgcggcagacagagcttttgaagcagaataaacgttagttgagtaaataactcatcttgttattgatgattgaaatatcctattagcatattctgattagctattagctaatcggattatgctaatagctaatcaggatatgctaatagccgaaacaagtcgatcataatgagtagcgtagttaataaagaccgttccgtccctgctgaacctctatccggataccgaaattaccattggaggacttcagttcgaatgctccccggaaattattcttctcccaaggcatggcactacggttgggcactttccatccgtctttgtcatagtctccgtatgtattgattttccatccgtttttcagtttgaaggtacccatctgcatgaactgcggtgaagacgacaatccccagccatacccatatccgaaaccggagaaaggggaagaaaatgcgtcggtgaatccctgcgtataggtcgcgtctgtattcagacggaatatctgattatagtctttactcacatccggtacatcgagactgaatttcggaagtttgggaggggccacattcattaatcccatatcgagcaggaagccaccgaattcctttatattgctcgacggagcacgacgaatactatcggaaggaacctccgactgtgcggatgcaaaaccgaccgataatatcagcgaaagaaatagaatcagttttctcatcttcgtaaaggttgattgatgacaaagatagagatttttagtctgactgcctgcttccgttatgttttcttagagaaaaatcctttaaaaaggagtgtgctgctgtctcgtcgggatggtgtcactatcccactaagatagtgtaagtatcctgtggggatagtgacactatgccagtaggatagtgacactattttagagcttagtttgcaatgagtttatagccgattccccgcacattgacgatacgtatttgctcatcctgcgacaacttatgccgcagtttcgtgatgaatacatgcagactccgggaattgaagaaactgtcatctccccaaagttccagcagaacgtcctgcgtattgaccacctgattccggttctcacaaagccgtttcagtatttccgactcacggtgggagagttcctgtctcactccggcatgcagcaatgtctgcgcgaccggatcgaacagataacttcctatctcaaaacggctggtaacctttgtttccgtgaagctgaacgcttttcccatcagcgccttgatacgtatgatcagttcctgcatgccgaaaggttttttcagataatcgtttgctccgagttcgaatccttctactacatcgttgatggccgaacgggcagtcagaaacagtacaggtgtctgcttgtccgtctgccggatgcggcgtaccatttcgaagccgtccattttgggcatcatcacatcggccaccagcacgtccggccgaagttcaaagaaaagatgcaatccttcttcgccgtcggaggcggtatggatggtaaaaccgttttcctcgagcgtatctttgataatcatggcgagtgtcagttcgtcttccaccaacaatactgtaatgtcgtttttgctcatgtttttgatgttttagatagtaatggtaaatgtacttcctttgccggattcacttttgacggtgatggtgcctccatgtttttcgaccatgcttttgacatagaaaagtcctaagccgtatcctttcacgttatgaagatttccggtcggaacgcgatagaatttgtcgaatatatgtttctgcttatccagggggatacctattccatgatcggagacggtgatagtcactgtttcccccgtttggcggcactgaatcataatctctgcttcttgtttcgaatatttcacggcattgtctatcaggttactgatgatattgctgaaatgagtgcggtcggctactatcgtcagtgcttccggttctgtttccagtgttatgtgtacggggatatccgcttttagctggtgctgctctattaaagaagtaatcagttctttcagacaaatctcttcggggtgcagtctgaacgtcttgcggctttccatgctcatggaaagaatctgttcgacgagtccgctcaagcgctgtagctgttcttggctgatgcgcagatattggtcacgtttgctcttttcttccgcctggttgaaattcagcagtgcatcgttggcggcatacgccacggcaatcggggtctttaactcatgcgtgatgttgttcgtaaagttgctcttcatttcttccagcgtcttttgtttcagcagtgtgcggatgaggaaccagaaggaaaatccgaggatgaggaagatgacaaatgaagtgaccaggatgccggtcatttgtttccataccagggaggtgatgggttccattatcagttggtagcgttgactgtgatgcctgttgaattcgtagttgtagcggatggctttcgggctggggatataggtgctgtctcctgcgatgcccagtgtatctatgaatgtctgggatgaatcctgagtggctccgctgtatatatataaggtacggtgaggcacatctatgttgtgtgctttcagtacatcggtcagtagactgtcatatttatgcaggttgatgtcgatgtaggtatccacgccggagtgcataccctgctggacgctgagtatgagttctttcattgagtcctgtttctttaataatacatcaagtccgctttcgctggaggcaacggcgctggcatccggatcgttggcattgacggctagggtatctactgctgtttccgtgcgtgtatgcagggtgtctttgtaggtactgtccgtataagagacggtctggcttgtcaccagcgacttgccgtccgcaccatatccggcggaaacggtgaccgaaccatgttccacattatccttttgcagctcgttgacgcgaagcacgatttcattaaagtcgctcgtacgcatggcgtctttgatattattgttcatttcctgcttcatcgtgcggtaaagccctgtcagccaatatgtctggtaaacaaagatgcctgtcagcgagcagatgacaaggatgatgatatgtttcaacggtaatttcatacggacaaagatagtatgaaactgttatttttcttctctttgataagactaaataacactagataagccggcgataacgtaaagtttcgttttttctcccgtattttgcagcatactcaaaaataaatgcgatatgaaacgaacttatttactgcttttgttacttttcatgtattggatgtacgcttctgcacagcaggtacagacagcgcaggaacctgccgacagcgtaaaaaacgtagcctatatagacagcctgtatcgggaacttcccgaagtcatgatcaccggcgaacgtccggtagtaaaagccgaacaggggaaactggtatacgacgttccgagactggtcggcagcctgccggtagacaatgcctatgatgcggtaaagaacctgccgggagttgtctccatgaatgatgccctgatgttgggagggcaaccggtcactgtggttatcaacggaaaagtgaccaccctctctgtagagcaattaagcaacctgctgaaatcaatgcccgtcagtcggattgaaaaggcggaagtgatgtattccgctccggcacgttatcaggtgcgcggaccgatgatcaatctgatactgacttcgggcatgggaaaagaaccttctcttcagggagaactatataccgcttacagccaattacactacgaatctctggcagagcgtgcgagccttctatactccggacgcaaattttctgctgatcttctctactcttactcttacagccgcgaacggagggagacagacaaggaagcgtttcacacgctcgccgacggttcggtgcatctgatgaatatgtatgatatcactacttcccgccacaacaatcaccagatacgccttgggatggactatgcctttaccgacaagcatttgctgagcttggtttataccactgctttcaccgatgtcaaaccttacgccacagtcaccggtgcgcagaactcggtcaccgattcgcactcggaaggacagctccataatgccaaactcgactatcagactcctttcggactgaaagccggagcggaatttacctattatcatgctcccggcagtcagctgctttacagcacactgggagaagaaacactgaacttcctgagcaaagataaccaacggatcaaccaatggcgtttctatgccggacaagaacatactttgggcgcagactggggattgaattatggtgttgcttatacgaccgcattggacaatagttatcaaatgtatttcgatcccgaaacggaagctttactgccggacaacaacatgcaatcccgtcgtcgcgagcagacgctgaacttttatgccggactcagcaagagcttcggtgagaaactttcggcggatgtctctctggctgccgagcaatatcatacggatatgtggaacgaatggagcctgtatccggttgccaacctgacttatttgcctgctccgggacatatcctgcaattttcattgagcagcgacaaggaatatccggaatactggagtatgcagaactccacttcctacatgggcgcttattccgagattcagggaaatcccttcctcaaaccggcaaccaactacgaagctaacattagctatatattaaaaggtaaatatgtgctgaccgcctattacagccgcacgaaaaacaaggaaatgcagacgctttaccagtctccggaacgtctggtcgagatctataaatgctttaacttcgacttctcggaacaggcgggcttggtaatggtagttccctttaaagtgaagaaatggctggactcccgcatcacggcaatcggcttccgttaccgtcagaaagacagtgatttctgggatatcccgttcgaccgcaaactatatacgtttgtattgaccatgaacaataccttcactctctccaccaaacctgatttgaagtttaccctaagcggattttatcagaacaaagcgatacaaggcattttcgaccttccccgttcgggaaatctggatgcggccctgcgctatactttcgcaaagggaaaagcacaactgaccttgaaatgcgacgacatatttaatacttccaccatttcgactaatgtccgtttcggacaacagaatgtgaagaatcactatatgaagactacccgtgccttcggtatttccttcaactacaaattcggaggatacaaggagaaaaagcgggaagaggtggatacttcccgctttaaataataagtattacctattttctgcatactcatccagtacgcgcttgatactttgtcctatttttacgtaatcggcttcgttcagattggcgagcgaaacacggacactccatttcggtccggcaaatccgccgccgttcagcaggacgagcgaagtctcgttggcaaggcggaaaacaacgtccagcggattgtaggtcttttgcagatagtctacaaattcgtcaccgtagaatttcttcgcccataccagcatatcgatttccgaataatatccggcacgcagcgggtcttctatcaacgtgaagccggtgctgtcccagagtgcatgcagtcgacggtggatgatttcctgcatctttgccttgtaccggtcttccttgtcgagaagggagaaagcggcgaacaggctcatctgcatttgctgaggcagcgagagtcctgcggtatggttcagcgcaatctgccggctgtcggctaccatgcggtcaataaacttcatcttctcggggtgtaaactgaggcttgcataacgcttgtttaagattgctgtttgctcctccgacaggcgggcaatcattttgtcgtagatgttgtcttcgtgtagggctatcactgcatttctccatcctgtggctccgaaatacttggagaaggaatagacgcagagtgtattatgcggcaactccgccatcaacgaacggaagtgaggtatgaatgttccgtacacatcgtccgtaatgatcatcagattcggattgtcattctttacgatgttgacaatacgtgcggcagtctccggactcagcgcataactgggcggattgctcggattggtgatgaacaacgcttttatctgcggattcttcagcttatcgatatcttcatctttatattgccaggtatgcagcccgtccggtgtcatctgatcggcagatatttcggtaacatcgaactgatagcggcgtaattccggaatctcgatgtagggcgtgaagacaggaatcatcaaggcgatggaatccccttgattcaacagaaagttttcctgcaatgaatcgaatacatagcacatggcagccgttccgccttcggtagcgaaaaggtcgaatgtgcctttagggggacggcggtcgcacatttcctgtgccagataatcctgtacgatcagttcggtgaagtgcaggatacggtcggggacaggatactggtcgccgatgaccgattccgcccattcatgaaccagtctgtccggatcggctgcgtgctccatcagcatataattataggtttctttcagtaacctggctccggattctttctcgttctctttgaggaaagcctcgaagcgggcggctattccttcctgttgtgggatgcctgcaattccttcttccagggattggacacggcgacattcgcaaagtccgaattttcctaacaggaagaatgcttcacgcggtttggtcgcaatccagttcgggttgcctcgtcctgcgttcagcatggtatgggccattttcttgatactctcgtcagccatttcgatgagcttgtttttaagttcgaaagggctgatcgtttccatctttttggcaaagttcttggtgatagctgtgccagttgttttcttttccataatggttcttattgttttgatacttaattttgatttcctatacattcattatactgacatttacatgagcaatacgatggctactccccagataatcagtagtgtattaccgactgcatacgtcacggtgtatcctaacgcgggagtgtcgcttcccaatgcatcctgaatagctcccagtgcggcggttgtggtacgtgctccggctgtacatcccagtgtgagggcagggtggaacttgaacagatatcttcccatcagcagtccgctgagaagagggatggcggttgccagtgcaccgacgataaacaggctgaatcctacttccttgaaaccggtcacgaaactaggtccggcagcgatgccgacaacagcgataaacatattcaatcccacattattcaatacccacaacgaaggttcggggataccgccaaaggtcggatgtttgctgcgcagccagccgaatacgagtcctgcgatcaaggcacctccactggtggacaggctgatcgggatacctcccaggtgaatggcaagtgcgccgaccagaccaccgagcaggatacccagtcccacgaagatcatatctgtctggttggtggggcgatcgatatagcccatctgtttggcggcagtttctacttcgagttttgttccggtcagttcgaggatatcgccggagtcgatcactgtctgagcgagtaccggaacattgatgcctgctcgcttgatactgcggatactgactccgtgcatgaatttcagcgcacggatcgtggagaccttttcgcctgcgaatgtgcggtgggtgaccattaccggaagcgtctctgccggaaagtcgagcagttgggcgtcgatcacttccggaccgatccagtcttcttcgccgattgcatattcacggcggccgcttaatacgacttcatcgcccggttgtagaagcatatccggggtgacttcttctatgacgcccttttgccgtacgcgttctacaaacagccgtttatcgttttccaccagatagttctccaattcgctgactgtttttcctttgccgaaccattcgttatctattttataagcacggaatacgacggggcggagggcggtgtaaaatccgggttcatctgcttcggaagttcccattttggcttccagctctttgcagtccgctttcaccttctccagtccgcccagcattttgggaccgagtgaagccagaatccatgcggaacctgccgtaccgaaaatataagtcacagcgtatgctacggggatggcattgataaatgtcgctttctgcgcatcgctgatgcttaattgattgatcgtgtcgcttgccacaccgattactgcggaaatggtctgtgagcctgccagcaatccggcagcctcgcctacatggtagcccatgattttggcaagtatccatggggcgatgaggctgacaatgcacatcaggacggcaaatcctacttgcggcaatccgtctttcttcaatccgcgaaagaattgcggacctaccttatagcccacagcgaataaaaacaggaggaaaaagacagctttcatcgggccgtctacactaatgtttaattgtcctaccagtactccgaccagtagcacgctggttactgttcccaacgaaaattttcctattttgaatctgcccagccagaagccggcgaataaagtgaggaaaatggcaagttcgggatgatccctgagttgattaataatccattccatatatgttgttcttgtttaggttatgttcataacaacagttcttgtgcaaaaagagtttagtgggttaagtacgttatcgtcatagtttctaaaaatataaattaattgtgcggaagtcccgggtaaacgagagagcgtcttaaatttctcagtttcgcttttttgttatacttttgtcacttcaaataaaactaatcatattctgtatgaaatcagacatagaaatagctcgcagtgtcgagttgaaaaagatcaagcaagttgccgaaagcatcggaatccctcgtgaagaagtcgaaaattatggtcgctacatcgcgaagattcccgaacaactgatcgacgaggagaaagtgaagaaaagtaaccttgtcctggtaactgccatcacagcgacaaaggcgggtatcggcaaaactacagtatctatcggtctcgccctgggactgaacaaaatcggaaagaaggcgattgtcgctttgcgcgagccgtctctcggtccttgcttcggtatgaagggaggagcagcgggtgggggatatgcacaggtgcttccgatggagaagatcaaccttcattttacgggagactttcatgcgattacttccgcgcataacatgatttctgctttgctcgataattatctttatcagaatcaggcgaaaggtttcggattgaaagaaattctctggcgtcgggtgctcgacgtgaacgaccgttcgttgcgcagcatcgtagtcggactcggacccaagtcgaacggcatcacgcaggagtcaggcttcgatattactccggcttcggaaattatggccattctctgcctttccaaagatgtggaagacttgcgccgccgcattgaaaatattctgcttggttttacatatgatgaccagccttttacggtgaaagatctcggagtggcgggagctatcacggtattgctgaaagacgccatccatccgaatctggtgcagacgaccgaaggtaccgccgctttcgtacacggcggaccgtttgccaatatcgctcatggctgtaactctattcttgccaccaaactggcaatgtcattcggtgactatgtgatcacggaagccggattcggcgcagacctcggtgctgaaaagttctataacatcaaatgccgcaaaagcggactccagcccaaactgactgtgattgtcgctacggcgcaaggactgaagatgcacggtggtgtcagtctcgaccgcatcaaggaaccgaacatggaaggactgaaagaaggattgcgcaatctggataaacatattcgtaatcttcgctccttcggacagacggtagtggttgctttcaataagtttgccaccgacacggacgaggaaatggaaatgctgcgcgagcactgcgaacagttgggggtaggttacgccatcaataatgcgttcagcgaaggtggtgatggagcggtagatatggcccgcctcgtagtcgatacgatagaaaataatccgtccgaacctttgcgttatacgtataaagaagaagacagcatacagcagaagattgagaaagtggctaccaacctttatggagccagcgtcattacgtacagcagcatcgcccgcaaccgcatcaagctgattgagaaaatgggaatcactcattatccggtttgtattgccaagacacaatactctttttctgccgatccgaagatttatggcgccgtgaataatttcgagttccatatcaaggatatagtgattaataacggtgccgaaatgattgtagcgattgcaggagaaatccttcgtatgccgggattgcccaaagaaccgcaagcgttgcatatcgacattgtagatggtgaaattgaaggactgagctgatttttactatttcatttagtatatttctgtactgtcaatcatccaatataaatccccgtctttccacttctgatagtttgggaagacggggatgattgtatatagagtccagtgtaccggtatgttgaccttgtctgatacactgtacgattgaagtcgctgctttccggaagagtatagtgcgtatttcaatttctctttttgtagtaagaaaacatcttttcgagcagatagtttgtctgattctgttaataaataaaaaagaaaagcctgttttcttcacagaaagcaggcttataaaattcaaaagaaattctttatgaaatgttgaacacaaatgctgctaattcacattaccggcatttggttactcaaagaaagaaatcttaatcagcaaaaagaggatatttcttcattgtctcattgacacgtgcacgtacttgtgcgatcacctcttcattttccacgttagacagaacagtttcgatcatttcggcaatttcgatcatcaggtcttctttcgcaccacgggttgtgatggcaggagtacccagacggataccggaagtttggaaagcagaacggctgtcaaacggaaccatgttcttattcacggtaatgtcagcagaaactaatgctttttctgctaccttacctgtcagatcagggtatttgctacgcaggtcaaccagcatggagtgattgtccgtaccaccggaaacgattgtaaaaccacggtctatcaaagcctgtgccagtacggcagcattcttctgaacctgttttgcatattccttgtattccggttgcaggatttcgccgaaagctacggctttggcagcgattacgtgttccaacggtccgccctgtacacctgggaatacagctgaatccagtaattgggacatcattttgatttcacccttcggagttttctttccccaaggattagggaaatcttttcccatcatgatgaccccaccacgaggtccgcgaagtgttttatgtgtagtcgaagtgacgatgtgtgcatatttaaccgggttctccaacagtccggcagcgatcagacccgcagggtgagccatgtcgatcatcaggatagcgcctactttatctgcgatttcacgcatacgtttgtagtcccattcgcgggaataagcagagccgccgccgataatcattttcggcttttcgcgcaaagcaacttcttccatctggtcgtagtctacacggccggtttcctgattcagattgtattcgcaaggagtgtagataatgccggaagtgtttactaatgaaccgtgagaaaggtgtccgccgtgtgcgaggtttaatcccataaacttgtcgcccggattcaaaacagccagaaatacggctgcattggcttgtgctcctgaatgcggttgtacgtttgcccattcggcaccgaagatttctttcaggcggtcgatagcgatttgttcgctttggtcaactacttcacaacctccgtagtaacgtttgcccggataaccttctgcgtacttgttagtcaggcaagaacccattgcctgcattacctggtcacttacaaagttttcagatgcaatcagctcgatacctttcagctgacgttggtgctctttttcgatgatgtcgaaaattaagtcgtctcttttcattctttttataagtaagattaaatttttaattcgagatacctattttaagcgcacaaagttagtgaaaataaataaagaacgaaggaactataagaaaaatgttagtaaatggaggaaattaatagataatggataatttatcgtacggaatgaataggaggtgtctgtttttgccggttgccgactatcaaaagttcatcagtcggctgtcggatgttctttaaagaatgaatccgaacgagaaacttaatgcgctgtcgcggcggcggaaaatgatagggctgactcccgtgctgccgtctgaattgatattgtcataaacgatggatttggagatatttcctatcccctgttcgtagcggaagtcgaaaaagatgcgggagatattgacgccgacaccgatcacgacgctgacattgagcggatacagcttttcatgaatccctttctggtcgaagtttgtgaaagtgatttcgttctgctttccccatagataccggagtttgggaccggcaaagatagacattccgtaaggtccttttttcactacattatatccgtagagaacagggaagtcgatactgtgaagtacggattgtacggaagcataatcgggttcgatggcagggtgctgcgaaccaagtttgtcaaaggtgatctcgcctttgctgacattataggatgcttccggctgaatgaaatgcttctttatattaaagcgcatgaagatcgcgccaaaatagccgatcttataattattttgtacttcgtcgatcgttacgtctttgattttcaattcggataccataaacatggaagaattaaatccggctttgataccgaagttgattttcttcgtgttgggacgttccactttatctgcgttacgatcttgggcgaaagctgtacaagctatcgccatccaaccgaaaagaattatgttgcgcagtatattcatggcagtacttttttctttatttcttcttttctacactccagccgaatttccctattttttctcccaggtcgtaatatcctccgtgcacatataccagcgggttcgcttccgccagttcgaacttgccggtttcgggattcaggttccggtcgtctgcacggacgtttaccacatcggcgataaacatatcatgcgaaccgagcgaaacaatttccttcacgcgacattcgatgcagaggggagactcttcgatcagcggtgcgctgactacggtgcagcgtcccggagtgagtttcatctcttcgaatttacgataattccgtcccgaacgtactccgcaccagtcggtggggaacgccatatctttagttgtcagattgatgacgaactccatatttttcttgatgatgtcgtaggagtgtcgttccggtcgtacggatatatagcacatgggcgggtttgtgcaaatcgtacccgtccatgctactgttataatattatattcactttcatcttttccgcaactcaccaatacggcaggcagcggatagatcatcgttcccggtttccagtcttgtttcaatttaataaaaaattaagaatgaggaatggagaaactagaggatggtgatttcctcgcgtttctgttctttctcgcaataatggcacttcacgatgcaattatccttgtctatcacatgaaataacgtaggcataggttcattgttcgtgatgcatttcggattggcgcattttacgatgccgtgcagttcgtccggcattctgacttctttcttttcaacgacttcatagtcgcggataatgttcagttttacgtaaggtgctactaccgatatgcggttgatttcttcgtcgcagaaaaacttgtcggcgattttgataatgcctttttttcctagctttttgctgtcgaggttgaagccgatggtgatgttacatttcatttgctccacgcccagtaactgtacgacagtaaagagtttttctgatgggatatggtcaatcactgtcccgtttttcagggcagctacttgcaatgcttgtttattttcgctcataataaaatatcgtttttaacgtcctctaatgtgatacctaatacgtcgcaaaggatggcttcacgggcatacagaccgttttgcgcctgttggaaataatatgctttcgggttgttgtccacgtcgtaagcaatctcgttgacacggggcagcgggtgcagaatgcggaggttcggacgggtgttctccagcatcttgttgcgcaggatatatacatttttcactcgttcgtattccatcaggtcggtgaagcgttcgcgttgcacacgggtcatgtacaggatgtcggcatcagcgataatttcttcggtaaattcggtatgttcaatgtatttgatctgatgctctttgcagtatagcttatattcttccggcattttcagttcatcgggggcgatgaagtggaatgtaggattgaagtgacgcatagccatcagtagtgagtggacggtgcgtccgtatttcaagtctcccaccagaaagatgttcaggttttccagtgttccctgagttttgtagatggagtagaggtcgagcatcgtttgtgacgggtgctggttggctccgtctcctgcattgacgatgggtacgggtgctacttcgctggcatatcgggcagctccttcgagatagtgtcgcatgacgatgatatccgcatagctgctaaccatcatgatcgtgtctttgagtgtttctccttttgaggagctggttgctttcggatcagtaaatccgatgacgcgtgcgccgaggcgattggctgctgtttcgaaactcaaacgggtacgggtggaaggttcgaagaacagggttgctactaccttaccttgcaataaccggcggttggggttcatttcaaactgcttcgccatttcgagcatgtagaggattttttctttagaatgttcggcaatggttactaaacttctgttttccattttgttatcttttatgtggatagaacttgttttaccggagtgtaaaggtacgaagaaaatgtaaaatacaaactttttttctctttttattcgtttttcggttggttttaaaatatcaaataaatcaaaaactcgtttgctgtatgctatattttatctacctttgcggcttaattataagcatcttttttaagctagaagaaacatgattcgaaaaataataaacgctctttgggtattgttggcagttgctttaatagctatcgtagttgtttttgtgtctatctctaagggctggataggctatatgcctcctgtggaagaactggaaaatcccaattataaatttgcaactgaggtattctcggaagacgggaaagtactgggtaccttctcaatggaaaaaaacaatcgtgtatacagcagctatgccgatctttctcccaacatcattcatgcgctgattgcgacggaggatgttcgctttgccgaacattccggtattgatgcgaaggcacttttccgtgccatcgtcaagcgtggattattgttgcagaaaagtgcgggtggaggtagtacgatctcacaacagttggcaaaacagttgtttacggaaaaggtggcaagcaatactatgcagcgtctgttgcagaaaccgatcgaatgggtgattgccgtaaaactggaacgttactatacgaaagaagagattctgacaatgtatcttaataagttcgacttcctgaataatgctgtcggtataaagacagccgcgtctacttatttcggctgtgaacccaaagatttgaaaatagagcaggcagcgatgttggtgggaatgtgtcagaatccgtcccgttataatccggtatcccgaaatccgaaaatccgtgagaatgcattgggacgtcgtaacgtcgtactgcgtcagatggaaaaagccggttacatctcggatgcggaatgtgattctttgcaggcacttccgctgaaacttgcatatacccgtgtagaccataaagaaggtctggcaacctatttccgcgaatatcttcgtggtgtgatgactgccaagaaaccggttaagagcgagtaccgcggctggcagatgcagaagtattatgaagattcactttcatgggaaacaaatccgctgtacggctggtgcgccaaaaataaaaagaaagacggctcgaattataatatctacacggatggtctgaagatttataccaccatcaattcgcatatgcagcaatacgctgaggatgctatcaaagaacatttaggcgacttcttgcaacctctgttctttaaagaaaaacaaggaagtaagaacgccccgtatgcaagggcattgccgcaggcgcgggtggaagaattgctgaccagagccatgaaacaaaccgaacgttataatgtaatgaagtcagcgggtgcttctgaacaggagattcgcaaagcattcgatactcctcaggaaatgtctgttttcacctgggcaggtgagaaggatacgattatgactccgatggactctattcgctattacaaacacttcctgcgtacaggattcatgtcgatggacccgatgaccggatatgtgaaggcgtatgttggaggaccgaattatacatatttccaatatgacatggcaatggtgggacgccgtcaggtaggttctactatcaagccgtatctgtatacactggcgatggagaacggattttcaccttgtgatcaggtgcgtcatgtagaacaaacgctgattaccgaaacaggagaggcatggactccccgaaacgccaataataaacgttatggtgaaatggtgactctgaaatggggactggccaattcggataactggatttcggcttacctgatgggtaaactgaatccttataaccttgtaaggctgattcatagttttggtgtacgaaacaaggcgatcgaccctgttgtttcactttgtttgggtccctgcgaaatttctgtcggtgaaatggtaagcgcatatacagcttttgccaataaggggattcgggtagctccgttattcgtcacccgcattgaagatagtgacggcaatgtgctttctacgtttgcaccgcagatggaagaagttatcagtgtttcgagcgcatacaagatgttggtaatgcttcgttccgttatcaatgaaggaacaggcggacgtgttcgccgttacggaattacggccgatatgggcggtaaaacaggtacgaccaatgataactcggatagctggtttatgggctttactccatcattggtgtccggttgctgggtaggaggtgatgaacgtgacatccactttggtacaatgacttatggacaaggggctgccgccgcattgcctatctgggcaacttatatgaagaaagtctacgatgacccgactttgggatacagccagacggaaacgtttaaactgcccgaaggttttgacccttgtgccggttcggaaacaccggacggagaagtcttcgaagaaacgggactggacgatttgtttaattaaacctctcatcgtgcataaatgtatcatttgtatcggaagtaactacaaccggaaagagaatcttcttctggctcgcaggagactggtggatttgtttcctaccatccgctttacgtctgaacaggagacacgccctttgtttttcagaagtccggcattgttctccaatcaggtggcgatgttcttctcggaagcggaggaggaaagagtgcgcaaggagctgaaagctatcgagcagtccgccgggcgtcgtccggaggataagaaggaagaaaaaatcagtctggatattgatttgctctctttcgatgaccgggtgttgaagccggaagacctgaaaagagagtatgttgtgaaaggattagaagaattaaaatacaatcagatatgaaatttctgggaataatacctgcccgctacgcatccactcgtttccctgcgaaaccattggctatgctgggggggaagacggtgatacagcgtgtatacgaacaagtagcgggcatcttggatgatgcttatgtggctaccgatgacgaacgtattgaagctgccgtaaaagcattcggaggaaaagttgtcatgacttccattgatcataaaagtggtaccgaccgctgctatgaggcgtgcacaaagatcgggggcgactttgatgtggtagtcaatatacagggggacgaacctttcatccagccttcccagctgaatgctgtaaaggcttgtttcgaagaccctaccacgcagattgctacgttggtgaagcctttcacagccgatgaaccgtttgccgtactggagaatgtcaactccccgaaagtggtgctcaacaagaattggaacgcactttatttcagccgttccatcataccttttcagcgcaatgccgataaggaagactggctgaagggacatacctattacaaacatatcggtctgtacgcttatcgcacggaagtattgaaggagatcaccgctctaccgcaatcctctctggagttggcagaatcactcgaacagttgcgctggctggagaatggatataaaataaaggtaggcatcagtgacgtggaaacgatcggtatcgacacaccgcaggatctggaacatgcagaagaatttttgaagaacagaagctgatttatggatcgtacgatacaacctgaaatacaagccctgaaaaatttccatatcctttctcccgtccggactactttgccgaacggtgtcccgttgacggttgtcaatgccggtgaacaggaggtggtccgtatggatattctttttgccggagggcgctggcaacagtcgcagaagttgcaggcgctgtttacaaaccggatgctacgcgaaggcacgcagaagtatacggcggcaaccattgcagagaaactggattattatggttcatggctcgaactgtccagttcgtcggagtatgcttatatcactgtctactcgttgaacaagtatctggcaaaaacgctggaagtcgtggaatccatgattaaggaacctgtgtttccggagaaagaactgcataccatcctggatacgaatatccagcaatatctggtcaatacttctaaagtagacttccttgcacaccgtggcctgttacaggcgctttacgggacacagcatccatgtgggcaaattgtagtggaggaggattatcatgccattacaccggaagtactccgtgacttctacggacggcattatcattcgggcaactgttccattttcctgtcgggtaaggtgacggaagatatcatccgccgggtgaccggtgctttcgggactcctttcggacaatatcagctgaaagcatcaaaaccgatattttcattcgttgccgttcccgaaaaacgaatattcatagagcgtgaagacgctttgcaaagtgcggtgaagatgggatgtaccaccattacccgtcagaatcctgactatctgaaattacgcgtactgatgacgctgttcggaggatactttggcagccgtctgatgtctaatatccgtgaagagaaaggatatacttatgggatttctgccggaattatgttctatccggatagtggtttgctgggaatctcgaccgaaacggataatgaatacgtggaaccgctgatacaggaagtatataatgagatagacaaactacaccgggagcctgttcctatggaagaactgacgatggtgcgcaactatatgctgggcgaaatgtgccggagctacgaatcgcctttctcgctggcggatgcgtggatttttattgctacttcggggctggatgaccagtatttctcccgttctttgcaggctgtaaatgaggtgacacctcaggaaatacaggaattggcacagcgctatttgtgcaaagagacattaaaagaggtcattgctggtaaaaagttgtcataatttgctttccggtatggcactttttgggagagaagttgtatctttgtccaaactgtaattttaatgagtaacgagtaaaactaatgaggaaatatctatatactacactttttttgactcttcttgcacagggaggagtgatggcacaagataacaataccagcaaaggtgggttcttcggaaagttgaaagacacattctctacagaaataaaaatcggaaattatactttcaaagatggtagcgtctatacaggagagatgaaaggacgcaaaccgaacggaaaagggaaaacggtctttaaaaatggggatgtctacgaaggggaatatatcaaaggaaaacgtgaaggctacggaatctattcttttccggatggagagaagtacgaaggtcagtggttccaggatcagcaacacggaaaaggaatctattattttatgaataataaccgttatgacggtatgtggttccaggattatcagcatggtgcaggaacgatgtattatcataatggcgacttatacgtgggcaactgggcgaacgacaagcgtgagggcgaaggtacttatacgtgggcgaatggtgctaaatacagcggtcactggaagaatgacaagaagaacggcaaaggcaccatgaactgggacgatggctgcaagtacgacggtgactggaaagatgatgtacgtcacggaaaaggcgtattcgaatatactaacggagataagtacgatggtgactgggcagatgacatccagcacggaaaaggtacttattttttccatacgggagatcgctacgaaggttcttatcttttgggagaacgtaccggagaaggcgtttactatcatgccaatggagataaatatgtaggaaatttcaaagacggtatgcaggatggaaaaggtaccttcacgtgggcaaacggtgctgtatatgaaggtgactggaaaaacaataaacgcgaaggcaaaggtatctataaatggagtaacggggatgtttacgaaggagactggaaaaataatcgtcctcacggtcagggctctctgaaaaccgttgccggtatgcaatataaaggtggtttcgtagacggactggaagacggacaaggcgttcagatcgacaaagacggtaaccgcttcgaaggcttcttcaaacaaggaaagaaagatggcccttttgtggaaacagataaagacggaaaggtgatcaaaaaaggaacctataaaatgggaagacttctttaaaagaaagaattatagataaataagaaagccggctaaattcaagtttagccggctttctttatcttatcctttactcatcattcttcatttagatgatatattgtgaactgatggactcgttattcattacccgcttgattgtttctgcaaacatatcagcgatgctcagttgtttcactttcgcgcatttcttagcgtaagggatactgtctgtaaataccatttcagtcaatccggattcctgcacacggaaagaagcagggtcagacattacacagtggctggcaatagcgcgtacggatttggctccggcttccatcatgatattggcagctttggtgatggtgcctgctgtatctacgatgtcatcgatcaatactacgtttttgtctttcacatcaccgatgatttgcatggaagctacttcattggctttttcacgtgacttgttgcagagtaccaaaggtacaccaaggtatttggagaaagtgctggcgcgttttgaaccacctacgtccggtgtagcaatcaccaggtcttccagtttcaatgactggatataggggaggaatacggctgatgcatacaggtgatctacggggatattgaagaatccctgaatctggtctgcatgcaaatccatggtaatcagtcggtcgatacctgctactgaaagcaggtcggctaccaatttagctccgatagatacacgaggtttgtcttttctgtcctgacgtgcccatccgaaataggggataacagctacgacgctctttgcagatgcacgtttggcggcgtcgatcatcaggagaagttccattaagttgtctgagttagggaaagtagactgcacaaggaatacatgtgcgccacgaattgattcttcgtaagaaacggcaaactcaccatctgcaaagtgggtgatgttcatgtttcccagaggacaattgagacttgcgcagattttctctgcaagatatctcgagttagttcccgagaataccataaagggtgctttttcgctcattttgtaatagatgttacctatttgttaatttgcctgcaaaggtaggaatttctcttattatttagaaagacttattgtagaaaaaataattttctctccaacttatcggaaatatttgtagatttgcaagtaagaacgaagaactgagaatgaagaatgaagaattatggacgaaaaacagaaaatgaagagcgaagaatgaaagatagttatcgcctgtctttttattctccattttccattttccattctccattatatataataggagtattgttgctttcctcccttttttcgtgtaccgacatggtgcccacaaaagaagtgaggcttatcgactcgctgaatggaaaagcgtatgcttatcgttaccgtaatctggactcttcctacaaatacgcctataaagcatatcggcaagtaaacctgtataagtcggggaaagcggaagcttccaataatctggggttctgtgctttcatgaatatggatttcgaccgtgccgaggcgtatcataaagaggtatacaagctgactaaaaatgagcttgaactgttgatagcagacatcggactgatgaaaatctgccagcggacagcgctcaacaaagaattttatgattaccggaacagtgccctccgacggatgaagcgtatccgtgaagagagcgacctctttgccgaccgtcacgaagcgcttcggctggattacgcatttaccgaattttttctcgtttcctccatttactattactatctccagcaacggcaggaagcgataacctctatcgataatattcaggaagacgaagcgttgagcgataccaatcagcttctttattatcattatctcaaaggatcggcttctttggtcgcagcgaatactccggaagaacggaaactccgcgagtttgacgaactttatttcacttggcggacagccgtgaagagcaagcatccgtattttgaggggaatggaatgcagggacttgccaatctgatggcatccccgtctaattttgagtttttcaagacaaggcgtacacatgcgttggatcagtttgattttccggtagattctttgttccctttgcgtttggcccaactggcactggagaaatttcgcgaatataatgacttgtatcagattgccggagcttatgtatctatcggcaaatacctgaatgcgcatggacgttatcaggaagctttggatacattatcaaaagcattgaactgcgtaaaccatcatcacatgctttattatcataatgaagtggatacgcttgataaattatatacgtttgccgagggagatactacttataccggagttccatggattggacaggagaaggtgaagaccgttcccgaatggatctcacggataagggagcagttaagcgtttcatatgccgggctggggatgaaggatgcttctgattataaccggaatatctatctggatattttgaactttacccgtcaggataaggagttggaaagccgttatttgtctttggaagcaggttcgcgacagatgacggtcgttctttttttggttattgtcggcttggtactggtgattatcctttggtggttcttcaacaaacgttccaaaattaggaatcaggtggatgtggaacgtctgcaacggattctctctctttgtcgggatatcacttcttccataccgatgaacgtacctctgattcagcaaggcattgaccagttgttcgggaaaggacgtctgacgctggaaattccggaagaaggaaaagctgcactggtacctacttcccatcgactgaaccgggacgagaaggcattggtgcatgtagtggaaccttatatcgtatgggctgctgaaaatgaacaaatggtggctaccttgagtgacgagcgaaatcagctggagaaacagcggtatatctacgagcagcatattgcaggaaacaaacgtcagaatctgataaagaaggcttgtatggccatcgtgaacgggattaatccttatatcgaccggattctgaacgaagtacataagctgacggaaaaaggttatattgatgacgccaggataaagaaagagaagtaccagtacattgatgaactggtgactaccatcaacgaatacaatgatattctggcactttggatcaagatgaagcaaggtacgcttagtctgaacatcgagacattcagtctgaatgaactgtttgatttgctgggaaaaggacggcgtgcttttgaaatgaaaaagcaaaagctggaaatcggaccgaccaccctgatggtaaaggccgatcgcgcattgaccttgtttatgattaatacactggctgaaaatgcccgtaagtatacgcccgagggaggaacggtaaaagtatatgcacatgctaccgacgcatatgtggaaatctccgtagaagataatgggagagggctttcagcagaagatatcgcgcatatcattggtgaaaaggtatatgattcgcgtgctatcggcatgaaagacgcggcagatccggaagaactgaaagagaataaaggaagcggttttggcttgatgaactgcaagggaatcatagagaaatataagaaaacgaatgaactgttccgagtatgcgtattcgatatagaaagcgaaccgggaaagggaagccgtttttatttccgcttgccttcaggagtacgtaaagtgattggcgtgttgctctgcctgttgcttccgttgggaatggcttcttgtctgcatgaaccccttccgtcgatattgcaggatagtgactccattgcgattactacagactctacttatgaagatctgcttgatgcagcctctgattatgccaatgccgcttattttgccaatgtggatgagaactacgaaatagccttgcagtatatagattcggcaatgatgtcgctgaatgagcattataagaaatatacgcgtaccccgaagccgcatcgatacatgaaactggtgggaaaaggaacccctgccgaactgttttggtggaatgaactttttgattcagactatcatgtgattttggatatcagaaatgaagcggcggtagcattccttgctttgaaacaaattgatgcctacagttataataattctgcttttacagatttatataaagtacagggagaagaccagactttggaagggtattgcaggcagttggaacgatccaacacgaataagacagtgggaatcatcctctgtttcgtcttgctgatcgtttctctgatcggctattatctcttgtatatgaggaagatgttgcagaaccgtctgaacctggaacaggtgcttgagataaatcagaaagtttttgccgcctctttggtcagacctcagactcaggagaacgaggaagcgcttcagagggaggaaaatacacttaaagagattccgcagcgcatcgtgaatgaggcttttggctcagtaaatgagttgctgacaatcagcctgatgggcattgcagtttataacgaaactacgcatcggctggaatatgcttcctgtcccggacaggaaatgccggagatggtgcagcaatgttttgaaacgggggaatatctctcagaacagaatttgcaggcgattccgttgatggtggaagccggaggtgagcatcaatgtgtaggtgtgctttatctggaacggagggaagggacgcaacaggaaacggatcatcttctttttgaactggtagcacgttatgtatcgattgtggtatttaatgcagtggtaaaacttgccacgcaataccgggatatcgagtcggcacacgaggaaacacgccgtgcttcgtgggaagacagtatgctccatgtgcagaatatggtgctcgataactgcctttcgacgattaagcatgagacaatttattatccgaacaagatcaaacagattatcggtcggttgaatacgcagaaccttccggaaaaggatgaacgggaagctgtggagacgattacggaactgatagaatattataaagggatctttacgattctgagttcatgcgctgcccgacagctggaggaggttactttccgccggaatacgattccggtacaggagctttttgatgctgccggaaaatacttcaggaaggtcatgaaaaaccggacggaaaaggtagaactaatcatagaaccgatggaagccaaagtgatcggcgacgtgaatcagttgcgtttcctgtttgagaatctgattgatgaagcattggcggttcgtgaagaaggagtgatacgcttgcaggctcgtaaggacaacgaatatatccgtttcctctttacggataccaggcgcgagaagagtgtgacggagctgaaccagttgttctatccgaacttggctcgtatgacttccggcgaaaaaggggagttgaggggaacggaatatctgatatgcaagcagattattcgtgaccatgatgaatttgcggggcgcagaggatgccgtatcaatgccgaaccggcagaagggggaggatttacggtttacttcaccatcccgcgcagataagaaagaagacacataaaagttattagataaataaaatggaagaacagaagtttaaagttattattgtagaggacgtaaaactggaattgaaaggcacagaagaaattttccgtcatgagatacccaacgcagaagtgatcggcacggcaatgacagaaagcgagttctggccgttgatggaagcacagcttcccgatctggttttgctggatttgggactgggaggttctacgacgattggcgttgatatctgccggaatattttcaaacgttataagggggttcgtgtattgatctttacgggggaaatacttaatgaaaaactatgggtggatgtgctgaatgcaggagcggacggcattattctgaaaacaggagaattgctgaccaagacagacgtacaagctgtgatggacggcaagaagctggtattcaactatccgattctggagaagatcgtagatcgtttcaagaagtcggtagcgaatgacgccaagcgtcaggaagcggtaatcaactatgatattgatgaatatgacgagcgttttcttcgccatctggcattaggctacaccaaagatatgattgccaacctgaaaggaatgccattcggcgtgaaatcattggagaaacgacagaatgacctgatcggacgtctcttcccgaatggagaacgggtgggagtgaacgcgacccgtctggctgtccgtgcattggaattacgcattatcgatctggataatctggaagctgatgaagagtaaatggcgtatgccgcatcccgctacgatgttcctgctgctgacaatggcggtggtctttctttcgtggatatgtgatatctacggactgaaagtaacgctgccgcaatcaggggaggatattcgggtgcaaagcctgctgagtcctgagggaatccgttggtggttgcggaatgctatcaagaactttaccggttttgctccgctgggtatggtgattatcgccatgttcggactgggggtggcccaacattccggatttatcgatgcgtgcatccgtctgggagtgggaaaccggaaagagaaaagaaaagttatcctgtgggtgattgttctcggattgctgtcgaacgtcattggtgacggcggttatattattctgcttcccattgccgccatgctgtttcagtgggtgggacttcatccgatagcggggattgtgacggcttacgtttctgtggcctgcggatatagtgccaatatcgtactgagtacgatggacccgctcttggcgcataccactcaggaagccgcactcacactgatgggatatcagggaaacacggagccgctgtgcaactacttctttatgagcgcttcgacagtggtaattacagggatcgtttattgggtgactcagaaatggcttctcccgaacttaggaaaatatgagggaagtgtgaaagtcgaagcctaccgccctttgtcacggaaagaacgtcgtgcgctgatggtggctgtcacagtggcagggatatacgttgcccttattttgtggcttactttctcttcctatggtatcctgcgtggcgttaacggaggtttgatgcactcgcccttcatagctggtatcctgtttctgctatctctgggcgcaggctttacggggatggcctatggattcagctccggtcgttatcgcagcgataatgatgtgatcgaaggacttacccagccgatcaaactgctgggggtatatttcgttattgctttcttcgctgcccagatgtttgcctgtttcgagtattctcatctggacaagtgtcttgcgattatggaagcggacctgctttcttcttttgagccggctcctttgtccgcactcatcttgtttatcctgtttacggcgtttatcaatctgattatggtatccgccacttccaaatgggcatttatgtctttcatcttcattccgatgtttgcgcagatggggatttcgccggacgtcacgcagtgtgctttccgtatcggagacagttcgacaaatgccattactcctttcttattctatatgccgctggtgttgacgtatatgcggcaatatgacaaacagatcacatatggatcgttgctgaaatatacatggaggtactccttgtgcattctggcagcatggacattgctgtttatcgtatggtatctgttgaagataccgatggggttataattcacgattcaaagttccggttttaataaccggaattttgagtttctgaattaatcgctatatttgcacccgtcccttaaagaaaaagaacgaatgaatttaccagaagtctctgaaaaactaatcgaacaactgaatcacggtagcaccaaagcatttgataaaatttatcatacgtactatttatacctgtgtgcgatagctgtttactatgtacatgacaagagagtcgccggtgaaatagtcaatgatgtcttcgtctctttctggcagaatcgccaccatatcacttatcctgcccttccgtatcttcgtcgggctatacagaatgcaagtatcagttatttgcggtcttccgcttttaatgagcgcataatgaccgaacagatggaggaaatatgggcttttctagaaaatcatattctttcttccgacaatccattgcaggcattggaaagcagtgaaatgaacgagatcattctgcggaaagtagaggaactccctgccaaatgccgtgctgtttttaaggcgagcctgtatgaaggcaaatcgtacagcgaaattgcggaagagcagaatattaatgtcgccaccgtcagggtgcagatgaaaattgcgctgactaaattgcgcgaatcccttggtactccctatatgatagctattttgatgtttctttaaaaaaaatcggttttcttttaaacgtttctttttttattgcgtatctagttatatacaccatagaaaaagaacggtttatgatagaatattacgataaagaagaactggaattacagattagtaattatttgtcgggcaatagtaccgatgaagaaaaagaaacgttgcttgcctttctggcttccaatgaagcagctgcccggactttccgggaaatgtctgccgtatgggcactttcttccgtaccgtcgtttgcagaaatagaaaactccaatttagtgcggataaaggagagaatgactgctcctgcctcttcgaagcctgtccggaaactgatacctgtctggctgaaagtggctgccgccgttattctgctgatcggctgcaactatttctggtatacgtatacggaaaatctgacggaagtatataccaacgccgattctccttacgaaatcaaggttcctgccggatcaagaacgaatatcgttcttcctgacgggacggaggtttctctgaatgcaggttctgtattgcgctatcaccgtgggtttggtatccgcgaacgtaatgtgacgttggatggcgaaggatactttaaagttgcgaaaaatgcagaggttcccttcttcgtgaagacgaacgatgtgcaggtgcaggtagtcggcacggtattcaatgtccgtgcttatgatgacgataattatgtgatggtgtctctgctggaaggcagggtgaatttatcagcgtctgctaattctgtgatgaaattattcccgaatgagcaggcactgtataacaagaacaccggacgaatggaaaagctgaagaccaatgcaagtaaagcctgcgattggctggatggcgggttgaccttcgagaatgcttcattcgctgatattgcccatcgtctggaacgtaaattccaggtgaagatcagcatagaaagcgaacgtctgaaggccgaacacttctccggttctttcgacagcaatcagaatatttatgatatattacacgaaatcaacgttgagaaacaatacacgtggaaagtcagtggtgacaccatctttattaccgataaaagaaagggggtaagataaaaggaaggagaaagaaaatggacacagccgatagatataccggcagtccgcagctacgataaataactatatgttaacctttaatagtgataaaaatgagattgataataagaaaaacattattgatgtttctgcttttgtccctaagtaatgtcctgacaggttttcaactttcagcgcaggaacaaaacaagaagttcagtgtcaaagcagataacgttactttgaaagaagccattgaagtagtcaggaagcaaggaaattattcttttctgattcgcaataacgacattgacctgaataagaaagtctctgtgaacgtggacaagggtacaattaatgacgtgatggcccaactgctgaccggtacggggatcagttatgaagtgaacggaaaccgggtggtcatattccatgccgcagtgcctgaaaaggaacagggaaaagcgtttgtcctgaaaggcaaagtgaccgatccttcgggtgaaggagtgattggtgccaatgtgaaagtgctgaattctacggaaggtacgattacggatatggatggaaacttttctctgtcggtgactccgaatgcacgattatccgtgtcttatatcggatatgctacgcaggaagtcgttgtcaaaaatcagactcctttgcacattgctctgaaagaagacagccgtctgattgacgaagtggtggtagtaggctacggtgtacagaagaaagcgaatctgactggtgcggtaagcagcgtgaagatggatgaagtattgggagaccgtccggtagtgtcggtcagcgatgccttgaaaggcgcgatgcccggtttgcagattacgggtaactccggtagaccaggagaggaaatgagtttcaatatccgtggtgtcaacagtctggataagaatggcaaaccgttggttctggtggataacgtagaaatggatatcaatatgctcgatccgaatgatattgaatcagtaacggtcttgaaagatgctgcttcttcggctatctacggggcacgtgccgcatttggcgtcattctgattacgacaaagaaaggatcggattcaaccaggctttctattaattattctaacaatttctcatttagcagacctgccaatatgcctcgtaaggcaacaccgcttcagacggtgcaggcttataaagacatgggaaccatcaactatcagagtggacagaatgtggatacgtggctggatttattgaaagaatacaatgccaatccttcggcttatcccgatgggtatgcaatggtggacggattgcgctatagtctggcagaaaccaatctgtttgatgatatgatggagaccggtttccagcagacgcacaatctttctgtaggtggcggcacgaaagatatatcttatcgtttctctttcggtatggtcgatgagaatggagtgctggcctcggacaaggatgcgtataaacgttacaatgtgtcttcttatatccgttcggacgtattctcatggattactccggaactggatatcaaatacacgaactcgaaatcagaattgccggagacttcgggaggatatggaatctggggagcagccgttgccttcccgtcttatttccctaccggaacaatgaatatcgacggagaagaactaccgattaatactccccggaatctgattaatcttgcttatccgacgactatccagaaaaacaatatccgtatcttcggaaaggtgacgattactcctttgaagaacgtcaaactggtgggtgaatatacatacaaccatctgagtaatgaaaagaccaagtttgaaaagaagttctattatgcccacggaggtaactttgtgaaagagacttcgacggcaaactctaagtatgaaaactccaacggcattaccgattataatgccctgaacttctacggaaactacaataacacatggggcaagcatgaagtcaccgtgatgggaggtttcaatcaggagagcagtgactatcgctatgcggaaatgtcgcgtatgaacatgattaacgaagaccttccttctatatcgcaggctacaggagattatttcgctaaagataaattcgaacgctatacagtaagaggattattctatcgtatcaactactcctttgccggcaaatatctgattgaaacgaacggacgctatgacggctcttccaaatttccgaaagacagtcgcttcggtttctttccttctgtctctgccggatggcgtgtgagcgaagaagcgtttatgaaaccgttgacatccgtattgtctaacttaaaattgcgtgcttcgtggggtaatatcggcaatcagagtatcactccatacgcttatattccgggtatggatgccgagcaggcttactggaccgtttcaggtatcaaggtaactacccttaaacctgccgcattggtcagtaacagttttacctgggagaaagtgacgactgtcgatgtcggttttgatctgggtttattgaacaacaggctgaatcttgtattcgactggtatcgtcgtgatacgaaaggtatgctcgctccgggagcggaattaccggctgtgctgggtgcaagtgctcctttgcagaatactgccgatcttcgttccaaaggatgggagatcactgtagactggaatgatcagatcggaaaagtgaaatacaatctgggcttcaacctttatgatgctaaaaccaagattaccaagtataataacgagacaggtctcttcggcaaggataagaacgataaagatacttaccgtgtaggtatggaactgggtgaaatctgggggtatgttacagaccgcctgtatactgttgatgatttcgatgccgatggcaagctgaaagcaggcattccaaaagtggaaggctataatccgaatccgggtgatatcctgtataaagatctggatgacaacgatattatcaacgggggcacaagtacgacgaaagatccgggcgaccgtaagatcatcggtaatagtacccgtcgttatcagtatggcatccacggtggtgcaaactggaagggggtctctttatctttcctgttgcaaggagtaggcaaacgtgatttgtggattatgaatgacttgttctatccgcactatgacgcatggacgacggtatatgacacacaactgaattactggacgccggagcgcacagacagctatttcccccgtctgtatgagaaagctgccggaaatacagctgccaatacacgtattcagacccgttatctgcaggatggttcctacctgagtatccggaacatcaccttatcttataatttcccgtccaagtggatgactaagatcggtgtcaataatctggctgtcttctttagcggtgagaatctttatacattcgatcatttgccgaaaggactcgatccggaacgttcggtaacggatgacttgggacaacgtggttttacctatccgtatatgcggcagtattcgtttggtatcaacctttcattctgattgtttcactatttaaaagagtaattgttatgaagaaatatatactgggtacgggcattagtctctgtttgctgatgtcgtcttgtttgaatgactcttttctggaagtttatccgaaaggacaacagacggaagcgacagtctttactacctatgataacttcaaaacgtatgcatggggattatataatgtattcttcggatatacgtatgatacggggcagacggacgaaatattccgcggagattttgagtcggacaatatgatcaaaggtttgtccggatatgaagggcagtgggcataccagaaggcgaaggcaacagatgaagtcaaggaatgggattacgactatatccgccgggtaaatctgatgctggacaatatcgacggttcgcagatgaatgatacggagaaggagcactggcgcagtgtcggctatttcttccgttcatataaatactttcagatgctttcccgctttggagatatcccctgggtggagaatgcgttgaaagaagacagtccggaactgtacggcaaacgggatagtcgcgatctggtggcttcgaatatcctgtccaacctgaaatatgcggagacacatatcggtgcggacgatggcaaaaacaccattggtatatctgtggtgcaggcacttatttcccgttttgccttgttcgagggtacttggcggaagtatcatggattgtctgatgccgagacttacttgaaagagtgtgtacgtgcgtcggaagaagtcttgaaggtttatccgaatgtacatccacagtatgacgagcttttcaattcggagtctttggatggggtgacgggcattatcttgtataaagcctatgaaaccggtcagttgatgcatggcctgacacgcatggtgcgtaccggtgaatcttatattgaggcgacaaaggatgcggtagacagttatctgtgtacggatggtcgtccggtaagtactaccaccagtcggtatggcggtgataaggagatttacggacagttccgcgaccgtgattaccggttgtatctgacgatatgtcctccctatatggtaaagaaagaaaatggtccgagcacggccgactggaaatatacggatcatgcgcaggacagagagtttatagatcttcttgctacaatctccggtgagacttatcatcgtttgccgtcttccaacttcaaaggattcacggtgcaggggcagccgcacttcaagaatcagaactggggacagggctggaatgcttctcaaatgggattctgggtatggaagtactataatacgcataccgtagctaccaatgccaatggagtgaatacgacagatgcgcctttgttccgtgtaggagaggtaatggtgaattatgccgaagccatgtgcgaattaggtaagtttgatcagacggctgccgataaatccattaataaacttcgtgcacgcggacatgtagcgaaaatgacggtcgaagacattacagatgattttgatacggcccgtgatccttccgttcctgctcttctgtgggaggtacgcagggagagacgtgtggaactgatgggggaaggattccgtctggatgaccttcgcagatggaaaaaaggagactatgtcaataaacgcccgttgggagtatatgtgacgggagcttcggctaaaaatctgaaagtaaccggcggaccgagtaatgacgaagggtatgtttacttctttgacgctccgcttggatggcaggaacattattacctgtatccgctgcctctgaagcaactggcactgaatacgaatctggaacagaatccggtatggactaaataattttttgagtaaaaacagaggcaagacctgtaatattttgtatattgcaggtcttgaaaatttaaactataaaatgaagaacgctatttcggtaaaatatacccttctttgcgggacagcttgctgtatggcctctgctgtgcaggcgcagcacaatgtctccgatgtttccagaatgaatgttctttttctgatggctgacgatatgcgtcccgaactgggttgttacggagtggaggcggtcaagactccgaatatggatcgtctggcatcgagcggagtcttgtttcagaacgcttattgcaatgttccggtgagtggcgcttcccgtgccagccttctgacaggcgtatatcctcactatcccgatcgttttgtgaatttctcggcttatgccagcaaggattgtccggaggctatacctctttccggatggttcacaaagaatggttatcatacagtttcggatggcaaagtttttcaccacatgagcgatcatgccgcatcgtggagcgaacctccctaccggaatcatccggatggatacgatgtctattgggcggaatataataaatggaaactttggatgaactcagaatcgggcaagacgatcaatcccaagactatgcgcggaccgttttgcgagtcagcggatgttccggatacggcatacgatgacggaaaattggcggaacgtgccattcgtgacctgcggcgtatgaaagaaatgaacaaaccgtttttcctggcttgcggattttggaaacctcatttgccgtttaatgctccgaagaaatattgggatttgtataagcgggaagagatacctttggcttccaaccgtttcagaccggaaggcttgccggaacaagtccgtaattcgagtgagatatatgcttatgcacgggtgactgatacgggggatgccgattttcagcgggaagtgaagcatggatattatgcttgcctgagctacgtggatgcacaaatcggaaaagtgctggatgctctggatgagttaggtctggcggagaatacgattgtggtactgctgggagatcatggctggaatctgggcgaacatgattttgtgggtaaacataatctgatggaccgttctactcatgtgccgttgattatccgtgtgcccggaatgaaaaaaggaaagacccggtcgatggttgagtttgtagatttgtatcctactttgtgcgagttatgccagataccacaaccagcagaacagttggatggacagagctttgcaaaagttttcagcaatctgaaggctaagacgaaggatgaagtctatattcagtgggaagggggagacaatgcggttgatcaacgttttagttatgccgaatggatgaaaggtgacgtgaagaaagcaagtatgctgttcgatcatcggatagataaagaagaaaacaaaaatagagtcaatgagaaaaaatataagagtaaagttgaatcactctcttcttttatcaaagtgaagaaatcatcattaaaaaaataatatgagaacaccaattatgtcatgctgccgtttgatggcagttgctttatttctgttttgcagtatgccgctatttgctcagcggcaggatattttattaaacgacaactggaagttccgattctcgcatcaggtgcagaaagggtcggaaataagagtagatctgccccatacctggaatacacaggatgctttgtccggaaagatcgactataaacggggaatcggtaattatgaaaagaaactgttcattcgtcccgaatggcaaggcaagcgtcttttccttcgtttcgaaggagcgaacagtatagcagatgtatttatcaatcgccgtcatatcggtgaacatcgtggaggatacggagcttttgtctttgaaataaccggagaggtgaattatggaaaagagaactctatattagtgcgggtgaataatggagaacaactggacgtgatgcctttggtgggtgactttaatttttatggcggtatttacagggatgtgcatctgctgatcactgatgaggcatgtatttctcctttgaattatgcttctccgggagttcgtctgatacaggatagtgtcagtcatcaatatgcgaaaataagggcggtcgttgatttggcaaatggcaataatgccggtcaggaagtagaactgggtatccgtttgctggatggtcagaaagtggtggcgcaacagaaacagacacttactcttgccgggaatgcagctttgcagcaggaacttacatttgagataaataatcctcatctgtggaatggccgtcaggacccgtttctttatcaggcggaggtttctctgtcgagaggagggcaactggtagattgtgtgacgcagcctttaggacttcgttattatcggattgatccggataagggattctttttgaatggcaagcatctgcctcttcacggtgtttgccggcatcaggacaggagtgaggtgggtaatgctttacgtcctcagcatcatgaagaagatgcagccctgatgctggaaatgggagtgaatgcggttcggctggcacattatccgcaagctacctatttctatgatctgatggataagaatgggattattgtctgggcagaaataccttttatcggtcccggaggatatgatgataaaggatttgttaatctgccttctttccgtgccaatgggaaagaacagctgaaggagctgatccgccaacattttaatcatccttccatctgtgtatgggggctgttcaatgaactgcttgaatccggtgataatccggtggaatatatcaaggaattaaatgagctggcgcatcaggaagatactacgcgtcctaccacttcggcaagtaatcaaatgggtgacttgaatttcataacggatgccatcgcatggaatcggtacgacggatggtatggaggcaccccggccgatttaggacgctggctggacggtatgcatagagattatccggaaatccgtattgccatcagtgagtatggtgccggtgccagcatttatcatcagcaggattcgttggtaaaatccgtgccaaacagttggtggcatccggagaattggcagacctattatcatatcgagaactggaaagcgatttctgcccgtccttatatatggggtagctttgtatggaatatgtttgatttcggtgcggctcaccgtacggaaggcgatcgtccgggaattaatgataaggggctggttacctttgaccggaaagtacgtaaagacgcgttctacttttataaggctaactggaacaaggaagaacctgtgctttatctggccggaaaacgtaacaccgtacgttcccgacgtctgcaaacgattactgcattcactaatcagcccggggcggaactgtttgtcaatggaaaaagctatggtaaggcaatgccggatcagtatgctattttagaatggaaaaatgtggagttgcagctgggaaagaatgaaataaaagtagtttctagcaataaaaaagtaaaattgatggatagttttcgctgcaaactatagcataatgcaatagaaagcattacctttgcggtctatgtgtaaagctaagaaggagtccgtgaagtaaataacctttggcagtctgtcaaggttatcccttaattcatactctggcatattcttgccagagttattttcatattctatataataagtataatcgcatgtctataaagcggataataactatctgcaagatatacatgctcaaaaaaacaatgaaatgataaattcaattaatatacaaatcagagagaccaatacagatgatttcgacagcataatgactgttgaaaaacaagcgtttggctatgacaaagaagcacagttggtagccgatctgctggctgacaaaactgcaaaaccaatggtttcgttgctcgctttctacaaaggtgaggctgtcggacacattctcttcaccagagcctattttgatggtcagggagcacaacagatgatgcaaattcttgcacctttagctgtcaagccggaatatcaacggcagggtataggcggaatgctgatacgggcaggtatagagaggttgcaggaaaaaggttcgtgccttgtgtttgtattggggcataaagaatattatccaaaatatggttttataccggatgcagccaggctgggttatcctgctccttacccgatactggaacagttctcggattattggatggttcaggcaatcagtccgaagggatttgatgtggataaaggaaagatcaggtgttcggatgagttgaacaaacctgaacattggagagatgatgaatcggacagatagttccctgatagtagtttgttaaaatagaggaaatatataaagatttaggtagctttattagtgcagcctaaatataagacttatttttgtgtggggctgtccaaaatcggacagccccttttttagatgtattagtattttctattatctttcatcgccttcctccacctcttaaaagccctcataaggctatcttcctccactgtaccttccatattataatgttccacaaaaagctccatcgagcgtttgaacatgattccgtttttgaatttattctccagcagaaattcatagagttccgccctcatttccacttcgatttccttttctatggttaatgcgctttcctgcccgatataattatatacttccggattctttccgtaggctggattaggcagaacaaacgtgatatttcctgtttctttccaggatactttggatggatgcgggacggataactgatagagaaaatgatagatgggagtgatgtgagagagatggataggaatcggttttcggagagaggctgacgaagaaggtgaggggcgactttcggattcgggttctaaactttgtgcgtaacgtacgtacatataccttgccagatacggcttgatggtaatcgtaactgtaaccatgggattttaattcttaattgtaaataaatattatatgcatcagaccgcttcgggtcatgaattccgttttgtttgttgagaaaaatcccatgggttacggggacggaattatgcttttataagaaattgaaaatcaaatagttacaaatatctctttttggtttaaaaccaaagggccgttcctttaaaaccaacgccccgtttctttaaaaccaagagggtgtttctcggtgagaaacggaggtattggttaaaaccgaagtgcaaagctaggacgaatattcgtatttttcaaaataaggaaaatgccggttgatattactgtgtaatgatatgagaattatccgctaccaattaaaattgcgcgtatatacgcggggattgatgttgataaatagtacggtttttgcggttgagcgtttaacaaagtttattacaaacaggcgtttttcctttgcctctctttttttacgtgcctcccttgctctccggaacatctgtccggccgttaccactcttcctgaattaaataaaattaagaatctctgccggacgaagatggaattttcatattttcgccctatacttgtatataaaataactagtgatataagatgaaaagtaagaatggatttagccggtgtggggaactatacatcggtcgtttacaaaaagaggggcgcttttctacagcgcatgtctataagaatgcccttttttctttcagtaacttttgtggtacgcagaacgtgtcgttccgtcaggttacccgtgagtgtctgcgccgttacggtcagcatctgagtgattgtggtttgaaaccgaatacggtttctacctatatgcgtatgttgcgtagtgtttataatcgtggagtggagtcggggagagctccgtatgtcccccgactgtttcatgatgtatataccggagtggacattcggcagaaacgcgcgttgccggttccggaattgcataagcttctgtatgaggatcccaagacggaccgtttgcgacgtacacaggccattgccggattgatgttccagttctgcgggatgtcctttgccgatctggcacatcttgagaagtctgccctggatcagaatattctccgttacagccgtatcaagacgaagactccgatgagtgtggaaatccttgatacggcgcaggagatgatcagccagctcctgaatcatcagccttcacgtccggattgtcccgactatctgttcgatatcctttcgggtgacaagaagcgtaaggatgaacgtgcttaccgtgaataccagtccgcccttcgccggttcaataaccatttgaagggattggcaaaagctttgcgtctgacttctccggtgacttcctatacgctccgccattcatgggcgactaccgccaaatatcgtggcgtccctattgaaatgatcagcgagtcgctgggacataagtccatcaagacaacccagatctatttgaagggattcggactgaaggaacgtacggaagtaaataagatgaatttatcttacgtgaagaactactcaatggaggcgttgtaaatatataaaatattaatagtcagtattaaactatgtgcattacttcttaggtaacggatttaaatatgacgcaaagatagacaaaaacacaaataggaaacaaataaaattccattttttttcgttttatccgcaaataaggcaaaaaagtctttgaacatgaaaaaacattatcttcatgtcccactgccgttataccatatttccacaggaatataccccttctcgcaggctgcaaactccttctatcacgtatttgtcgatgtttttcactgttcccattctgtttgtctttgaatgtataggtttccgttacctaagaagtaacggacaaaaatggggtaaaaaaagatgattctaacaaacaagaaatctattaatgctgggcctagctatgggacaggggaaggcgtagcacactcaaaacgctggtatgtcgccttggttcgtatgcatcacgagaagaaagtttcggagtatttagacaagatgggcattgaaaatttcatccctcttcaacaggagatgcatcaatggagtgaccgtcgtaaactgatcgaatccgtccttcttccaatgatggtctttgtacatgccgacccgaaagaacgggtggaagttctgagcctttctacagtgagccgttatatggtgatgcgtggtgaaagcaatcctgccgttattcctgatgagcagatggcccgtttccgtttcatgctcgactattccaaggaagccgtatgcatgagcagttctcctttagcccgtggcgagcaggtccgtgtgataaagggacctttgtcggggcttgtcggcgaactcgtcagtgttgacggtaagagtaagattgctgtccgtctgaatatgctgggatgcgcctgtgtggatatgcctgccgggtatgtggaatcaataaaagccgtagtttgacaagataattagatctgtataatggagttacaggataaaatctttcatcttcataatcaggcccatcgccttcttcatatcgaatgctccggcagttatttgtatgctgacgacctggctcagctgaataaggatattcataatgaaatgaatgagttatatcctctgcatggcagtactccggaacaggacgcttccttgtgtcttgctcttttgttgggctatagtgtgagtctgtatgccagtctggaggatgacttgaaaagggaacatattctttcccgttctctggaacttcttgaaactcttcctccctcacctttgaaagatgatttatatactgtttgcaaagagtatatgagtgtataaagtttaaaattaagatattggggaataatatttatgaaacagacattagaaggtgttttaaaatacctccggaagaattattgtagttattggattatattgggaattgatacagctatagctgttctttgtacatggatagcctacatcggtatctatagtatgacgggaatttctgtacgaacagatgtttttgcgaaaattataggaatttcttttatttccagtatactcggttcatacatatttcgtacttatcgcaataccatacgtttttcacaattaaaggaattgtggcgtctgatgggaagtgcatgtttaaaagccatttgtatggttattgctatttggattttcatacctcaaatgggcttgtccaacagtcagagaatgatctttgtattattcgatggtatgctgacctttattgcaatggctggatttcgtattcagctgatactgatctacgagtttcttcttaatcagatgaataagaaaaacgagcgtattctgatatatggtaaagatgataaaagtgtggcattgcaggtacgtctgatgaatagcagacatttcaaagttgttggtttttatgtttatgatacaagtgcttcgatccttcgtgtagcaggctttccggtttattcttttaagaatgaaggagatttcaaaagacagatgcacaagcattgcatccaaagtattttatttgcacgttatgaagatacccgagaagaggaagaccgtttacttcaattttgcaaaaaaaataaaatcagaacactgatagccccttctattagtgaggctgatgaacatggaaactttcatcaatgggtacgtcctattaagatagaagatttgctggggcgtccggaaatcagtatcaatatacaggaagttgcagcagaatttcgggataaaataattatggtaacgggggctgccgggagtattggtagtgagctgtgccgtcagttggcgcaaatgggcattcgcaaattaataatgttcgattcagccgaaactcctttgcataatgtacgtcttgaatttgaaaagaaatattcaaatctagactttgttcccatcattggagatgtccgtgtgaaagaacgtctccgtatggtgttcgaaacttatcagcctcagataatctttcatgccgctgcctataagcatgttccattaatggaggaaaacccttgtgaagctgtactggtcaatgttgtcggctctcgccaggttgctgatatggcagtggaatacggagcagaaaagatgatcatggtctctaccgataaggctgtaaatcctactaatgtaatgggatgctcgaaacgtctggcagaaatctatgtacaaagtctgggctgtgccatccgtgagggaaaagtaaaaggtcgtaccaaatttatcactacccgctttggtaacgttttgggtagtaacggttctgtaattccccgttttaaagaacagattgagaatggtggtcctgtcacagtgactcaccctgatatcattcgtttctttatgactattcccgaagcttgtcgtctggtaatggaagctgctacgatgagtgaaggtaatgagatttttgtttttgagatggggacggctgtgaagattgttgacctggctacccgtatgatcgaacttgccggttatcgtcctggtgaagatattgagattgagtttacgggattgcgtccgggtgagaagctttatgaagaagtattgagtgataaggagaatacaatccctacagaaaataagaagataatgatagcgaaggtacgtcattatgaatatactgatatccttgatacttatggagagttcgagaatttatcccgtacggtaaagatcatggatacagtgaagctaatgaagaaagtggtacctgagtttaaatccaagaactcaccgaagtttgaggtattggataataactgaaagattgtctaaaagggaagaataagttttcgagcgtgaggaacaatctattcccgcataaaaagaatctgaaatgttaatttgtaaaatataagtaatgtttggtcactgatatttataataatggaaaagcaattgagtactaacaaagtgcaaagaaaataaggaattcaaagtcatttaagatagttgtttcataaagattaatataatcgtatatagtcacatttatggcaaaaaaagtaatgctcgtttttggcactcgtccagaggctattaagatgtgcccactcgttaatgagctccaaaagcatatgaaggagttcgaaactatcgtttgtgttacaggtcagcatagagaaatgcttgatcaggtgctcaagctatttgaagttactcctgattacgacctgaacatcatgaagcaaggtcaggatttaactgatgtgaccgctcgcgtccttactggtatgcgtgacgtgttcaaggagtgtcgtcctgatgtagtgcttgtccatggtgatactaccacttctacagcagctgcccttgcagcattctatgcacagattcctgttggccacgtagaggctggccttcgtacccacaacatctatagtccttggccagaggaaatgaatcgccagatcaccggtcgtattgctacctataacttctcgccaacctcagtttcagagataaaccttcttgcagagaaagtccttggtcaaatcttcgtaactggtaatactgttattgatgccctccacatggtggttagcaaactgaagaacgacaaagtacttgcaaaggaacaggacaatgtacttgcagtagcaggttatgatgtaagtcgtctctcagatggtaagaagctcgtccttattaccggtcatcgtcgtgagaactttggtgatggtttcatccatatgtgtacagctataaaagaccttactcagaagtatcctgatgtagatttcgtttacccaatgcacctcaatcctaacgtgcgtaagccaatccatgaagtctttggcgagaatttggataactttgaaaatttgttcttcattgagccacttcagtatttggagttcgtttacctcatggaaaagtcaactattgttcttactgattcaggcggaattcaggaagaggctccaggacttggcaaaccggtacttgtaatgcgtaacactacagagcgtccagaagcgctcggctctggaaccgtccatttggtaggtactgattataaaaagattgtgaatgaagtaagtgcgcttcttgatgatgaagctacttatgagaagatgagtcatgcagttaacccttatggtgatggtaaggcttgtaaacgcattattgctgctctcaatggtgagaatcctactccttatggaaagtaaaaagaataataagtaaaatgtcaaaataagtcatggttaacgtaattggcctcggctacattggacttcctacagctctgatgatggcctcgcatggtgttgaagttgtcggcactgattataacaaagaactcgttgcaactcttaatgcaggtaagacgacctttaaggaggatggtcttgatgaacttttcaatgatgcagtaaaagctggcattaagtttaccactgaatatcagaagactgacatgtacatcgtcagtgtacctaccccttatgacaagttctcaaagaaggttgacgcatgctatgttgtagtagctatcaaggaagtgatgaagatatgtcctaagggagcaaccgttgttgttgagtcaacagttagccctggtactatggacaacttcgtacgtccagtagtcgaggagaatggctttaagattggtgaagacctccaccttgttcacgcacctgagcgcattattccaggtaatatggtttatgagcttctccacaataatcgtactattggtgctgattccaaggaaattggcgagaaggtaaagcagtactatgtatcgttctgtcagggggaaatcgttgttactgacatccgctctgcagagatgaccaaggttgttgagaataccttccgtgcagtcaacattgcctttgctaacgagcttgcacgcatctgtcgtcatgataatatggacatttacgagattattaagatttgtaatatgcacccacgtgttaatatccttcagccaggcccaggtgtaggtggtcactgtatttctgttgacccatggttccttgtaggtgattacccacgtcttgctaaggttatagatgagtcaatgaagacaaacgactcacagcctgagtttatccttaaccgtatccatgaaattatgaaggagaacaacatcgagaataaccgtaaggtaggtctttacggcctcacttacaaggagaatgtcgatgactatcgagagtcaccaactctccaaatgcttgaattacaagagcatcatcttgcacgtccacttaagtgttatgacccattcctcgtaggaaacaagattgcagaaaatcagtacgatgacttcgatgagtttcttgttgatatagatatggttgttattatggttaagcatgatcacattaagggaaattggaataagctgaagggcaaggttattcttgactgcttcaatatctgtcctcttgaaggcgtttatcatatttaatattataaggataactggcaacgcaggtggaaccaatgttcgaagttcgatacttcttgccagtctgatattctttacttaagagttcaaaaaactatcagtgaactatcaatgaaagaaagatataattacatagattactctaaagcctttgcaattttactcgtgattacaggtcacatctgtttattttgtataaatagaggtaatgtgaataatgctgacaacatgagaatatatagttggcttacagttttccaaatgccattgttcttctttttaagtggaattgttatcaaacataaagactactcaataaaagaaacaattaaacatctatataaaaagacaagacaacttttagttccatttttcttgttcggtacaatttttacgttatttattcatcaaggtttttgtgaattcattactccagttatgaaacaaggctattagtatcttctggtattatttgagctctatcttatttattatttttttaatcccataagtttattgtgtaaaagcaaaatgttttcatttgttgtggatttgatattcattgttcttctatactccatgctccaattgttaaacaaaggagttgatttaaatagttcatgttggcagaactatctaagtttaatccaagtaaaaagatatgcaccattcttttttgtagcaatatttttaagaaaatacgatgcggttaatacgcttttcaataataaatatattatgttagcatcccttctaattgctgtcataacggagctcttgaaatgttttaattttaacatacatgcaattggttattggttaccatggatttatatagttctcagtatatctattattatgaaacttgaagttttagataataagatgacacaactgctgtcgtttattggtgcacatacacttgatgtatacgtacttcatttctttattgtaaggagtataagcatggcatttttgtgttcttatttcgataattataattatctgatcttagaattgttaattattagtcctatttctattctcatcgccgtcatatcggtatatattggcagggtaatcagagctaataaaagaattgagtccttcatcttttttagataataatttgtgcctaataaagaatctatctcagtaggaaaatctgacattatttggagctatattgccaaatttttaggaatagcatctggtttattagtcctgccttttattttgaatcgattgacggcagaggaaatggggcttaattatttgatgcttactataggatccatggtgtcattgttggactttggcttttcacctcaattcggacgaaacattacatatgtatttagtggggctaaggagcttgcaaaggagggattttcaaagaaggaagttgatagcaaacctagttacaggctggttgctactgttatcatcacggcaaagatggtatacaagcggctatcattattggtactcctaatcatgttaactgctggtacatggtatatccattatgttaccgatgggtttagtcaagtgcctaacactctcttgatatggattatctattccttatctgtatatttcaatatatatttcaattactatagcagtctgctcacaggtcgagggttaattaaggagaattccatttcaataatcctatcaaagttatcatatattatgattacgcttggtatgatatttatgaattgtggtcttctttccattgttgttgctaactttatttctccgttcattcaaagattctatgcatacaagatgttttatggcagaggattaaaaaagttactacctgttgatattaaaaaggatgaaatacagaaaacattctctactattgggtatagcgcaaagaaacttggtcttacgtttgttggtgcatacgttgtcaataaaatgaatatgtttattgttggcatctatctatccttggaagtaactgcgtcgtatggattgatggttcagcttggcaccacaatggtaacaatggcgtctgttttctttgtttcgtatcttccagtgttctcaaactaccaagtgacccgagaatatcagaagttgactgaacttctctcattcactatgatcatattttgggcgttaatgatttgtggttgtataggaatgttctttttcggaaactggttgcttgatttaataggttctcaaacgactctaccatcaagatggatttgcctactatattttctattctcaacccttgaattgaatcagtctaattttgcaacaattatagttacttccaatcgagttccttttgttaagcctacattgatttctggtgcagtaatttttgttggcacttttgttgtactcaaattgacaacgtggggtatactcggtgttgtgcttgttcaggctgttgttcagttatcatacaatgattggaaatggccaaaacaggtgtttgaagagcttaatgtgagtcttttgcaatttgttaaacttggaataatcaaatgcaatacattaataaaaagaacgaaatgagtaaaaaaattggaatattactcgtcgaatctcttcctcttcctcctgtcaaggggggggctgttgagaacttgacgcaactcattattgataataatgaggataggcatgatttggatatctatgtgttttcaaaatatgatggtgctgcggcagctgaggcaaagcaatatcataatacccaatataaatattgcaatccgtcaggaatctacgttctgatagatattttactcaaagttgtcagacgtatctgtaggaattatttgcatataaataccccttcactttatgagataaaggcatatcgctatttcaagcagcagggtatcaagacattgattcttgaaaactgtcctgcatacgctctatatcaaaatcgcaagtctgagtttgaacttattcagcatttgcataacgattatctcaatgcatcaagcaaaataaacgatctaatattccaacatacccaaaggatatttactgtgagtaactttattaagtctcgcttgcaacctattgtgccttcttctattccagtggatgtttgtcacaatggtatagacttgcaacggtttgagttgcctatagaaacacagaagaagcaagaactacagaaaaggtatggtatcagttctactgatagagtaattacattcactgggcgattagtaaataacaagggtgttaaagagcttatgcttgcttttgagaaggttgcagcaaaacataatgatgcgaaattactaatcgttggggggcagtcattctctaataatgttaaggatgattacgtcattgaccttgaatttatagcttctagaataggaaatggtgtcatttttactggatatgtagattactcagagattacttcttacctacaactctctaccattgttgtcgtaccatctacaagttttgaggctttccccctttctatactcgaagcaatggctgctggaatcccagttgtcgtgtccgatgctggtggaacgcttgaggtgattgacgaaagatcagggatagttgtgaatcgtggagaaggtttaattgatggtctatcaacggctattgaagacctgtgctttgatgacgaaaaactccacaaaatgtctgttgctgcaaagcgaagatcaaaagtcttctccgacaagactatgtataatagatttgtggatttattgaaatgaacctactttatatttacagttcaaatatcaatcctacgcatgggggggtacagagagtgacaaaagttctatgtgactacttccgcactctaggacataattgttactatctttcctctcaacctactaatggtggtattaagaaccaatatgtacttcccaatacagaactgctgaatgagcagaatatttactatatccaattattgttgaaggaacaaaaaatagatgtggttgtgaatcaggatggattgtacaagaatctgactaaacttgtgcatactagctgctacggtcatgccaagatatttacggtagctcataattctctccttgctcccgttactagttttactattgttcgttattctctatttaagaaatttcatctcgcatggctactccctttgcttagaacgtcagttgtcaagggagtgatgaatgctatgtataaaaagaaatacaaacagcattatcaagatattcttaagtattccaatcaatttgtactactttctaatgcatacaagaaagaacttgcatttttcctacccgatttccctcaagacaaggtatgtgctatctataatccttgtaccattgtatgcaaagatgatgagataatagaaaaaaagaagattgtactttatgttgggcgcatctcatttgctcaaaaacgtaatgatctcctactgcatgtgtggaagaatatcgagctacaacatgcagattggcaacttaaggtagttggcgaaggtgaagatcttccaagactcaaaattatggcaaaagaaatgagtcttacaaatatatcgttcgagggtttcaaatctccagagccatattacaaggaagcctctatcttctgcttgacttctgcatatgagggttttccccttgtattggtagaggctatgagttatggtgtggtacctgttgttttcaatagctacggagcagcagaaaatgtgattgataattgtgtgaacggatatcttgtaaagccattcgataaaaagggttatacaaagatagttgaatacttaattggagataatttacgtttgcttgaaatgtcaacccaatcggtactgaaagctaaagcttttagtgttgataatattgggaaccagtgggtaaaactgtatcaggagaagtaaaaatggatagattatataagttaaaatgttggatatatcccctttcctttttaggtgcagaaatgttctcggctttctgcggaattacaggttataaacaggaagaaggtagtacgttgtacctttattatatgatatcattgtttgcattttcaatgctattaattgtacatgatattttcatattgggtaaaccttttagcaagatggttttattaatcccaattatatttactgcatgttatttttctgatattagttctgaatcgcctcctttagaatggacaaaaaaggcttatcagttttttttattcttttcgctgtcaccaatgttaattgctagcttaattgcaaaaaacaatagtattgaaggtatgtataaatacttagatgttatcttgattattcttggtataggaatgatagcaagattgcctaagatgatgatgctaggagaattaatagaaggttataatggcatttcttaccagtcagcacttgcctttggagctatatattatggtttattgtcgaaacgagaagatagatttaaatttctaaaaaacaaagtctttaagttagtaagtatcgtaatgtgtgtgctgcttcctttaacatgtctttcttctggaggaagaggtggcgtagtctttctatttgcattagcggggctgattagtttaatctttgtcaagaaaagaaatatatttaaggtcctgttttttgtccttccgttgggtttactaggagttgtcattatatttgatcttgttcaaaattcagttcttgaaaatacttttaatagaggtatggatcgtgccttttcctatatttcttcaagcggtattgatatggcgcaaacatctaatcgtgatattgtatttgaattagcacaaaagaatattgaggcaaatctatatactggttatggaatctttcatactattggtgcatttggatatcctcataatatctttttagaaattctggaaggcggtggaattttctattttgcattttggataataatactaattataagtataaaaagagcatattttataataaaaatagaacgaaatcttttgttcctagtacccttgtttatatatccgtctgtaaatcttttattttcaggatcatatcttatgactggtatgttttggtttgttcttgtattcgttttaatctataaaccgcaacaatattgaataatggcaaaagtattaatccttcaaaacgaaatatctgcgtataatgtatcaacctacaattgtatttcagaacttcacgaactgacggttgcatattactcaaaagataaatcgtcaattccatgtagttttcaaaaacataaactaaattacataaagatcaagtctataattttagttagtgacttaaaatctctttgtaaacaatttgatgttgtcatattcgtaccagatttccatgtaccagcttattgtttattgccatttggtaatagacgatataaagtaatctcatggagtattggtttccgagtgtcttatgtccatccgtatattacctacagaaaacacaatttgttggatcgttttttccagaaagtgttatcagcatgtgatgctaatatcttctatataaataagtcacgagaattttggaagaacactaatttacggatggacaatatatttgaagcaatcaatactaccgatgtagagaaaatagaattcaaacctgagctaaagaaagactttctttttatagggacgctttataaaggaaaagggctcgatttgctgcttgaggcttacaataagttctacaaacagagttcatgcaatacaaaattgcgaattgttggtgcaggttctgaacgagaagtgttggaacaatatgttaaagataatggacttcaagacaatgttgcttttcatggagcaatctatgatgagaaggaaattttgaagatcttccaacagtcattgctgtgcttttctccgacacaagccggtttgtctgttccaaaaagtatgggttatggcgttccgttcgtctcacgcaaggatgctattactggtggagaaatctatcatatacagaatggcgtaaatggtataatgtatgagaaggacgaagatctctcggcaattatgttagatgcttttgaaaatcgtattaaatatatcgatatgggacgcagggcaatggattattattatagtaaagcgactaatgagattaaagctgaaggagtgatagatgcaattaactatgtaattagctaatcacaatgatgaagaatatagcgattattaataatgtagattttggtagcactggacagatatcactaaatctccatcggaatttattagctaagggatatcgatcatatttttgctatggtcgtggtgcatctccaactaattcgtatatgaaaaaaataggtagtttcttatctgttaatattcatgctttgatggttcgcatgacaggacgacagggattttattctagttcttcaacaaccaaacttttacgattcttctcaaaagccaatattgacacaatatacatagtttgtattcatggatactatttgaatgagtataaattgtataaatatgtggcagataataatattgctttagttcacataatgatagacgaatatgcttatggtggcaagtgtgcatataataatggttgcaatcgttattttttggggtgcggtaactgcccaaataaggcttcatatccaactagtctcattttggatggatcaaaagcagtgtttaaaatgaaacaaaaagcgtaccaaatgttatcaaaagctgcttttgtcggtccacgttttgttgtcgaaaaagcgaaagagtctcccttgctgcaaaatgctaaaattgtggaattagatgaatctattgatatggatatatactatcctagaaatacagataatctgtatagtgaacttggaataagtgataataaaatcgttatcacctgtattgcgccatttaataatacagtgaatgaccgtaaaggatgtcgattctttatcgaactagcaagaagatttgaaagcaataataactacatatttattcatgtaggatatatgtgtgaggataaatcatttttgccaaagaattatattccaattggatttattcgtgaccaaaataaactggcagagtatttttctatcggagatttatttgttttcccaagtttattagatacaatgccaaatgcttgtttagactcattggcatgtggtgttcccttattatgttttgatatatctggaatgccttatgtttcagataatactgtcggcacctttgtggaggcacgtaatgtgacggaattacaaaaggttgtacagaaaattgtaaagaagaatagcgacattattcaaaggtgcagaagttatgcattgtcgagatatgattcaaaaaaatacaatgagagattgatgcaaattggtgaatatttaaataaaatataattatgattccatttaataaaccctattgttctggtcgtgaactgaaatatatggaggaagtttgtcattctacaacaatgtcaggtaatggtgattttacaaagaagtgtcatactttttttgaggagaagtatggcttcaagaagtgtctgttgactacatcaggtaccgatgcacttgaaatgtgcgcaatgctttgtaatctccagccaggtgatgaggtaattatcccttcatacactttcgtatctaccgctcttgcatttcttcgtgaggatacgaaggtgatctttgcagattcaagtaaagagactcctaatatggaggtcgcacagattgaaccattgattacagaaaaaactaaggtcattgcagtggtacattatgcaggtgttgcatgcgatatggatgttattatggcattggctgagaagtataaccttcttgtagttgaggatgcagcacattgtgtagatagcttctacaaggataagccccttggtggtatcggtcatcttggggcattctcttttcacgagacaaaaaatatcagtagtggagaaggtggtatgcttgtagtgaatgatgatcgtttcattcgtcgtgcagaaattctttgggagaagggaaccaatcgtgcagagttctatcgtggtatggtcaacaaatacggatgggtggacatgggttccagttttcttccttctgagttcaatgctgcatttctatgggcacagttggagcaattggatgacattcaggataagcgcaagcatatttgggaaatgtactacaatggcttgaacggtaaggttggtgatatggttcgtcttccatttattcctgagtatgctacaaacaacggacacatgttctatctcctttgcccatcactggagtatcgtacagctctgatgacataccttaaggagaatgatgtacagacaacattccattatttgcctcttcatagcagtaagtactatgcagacaagtattatggtgctgaattgccaaattgtgactattatagcgattgccttgttcgtctgcctctgtattatgagttgacagacttggaggttaagaagataattaaacacattattgagttctgctcaaagaactaaaaagcacatccttacctgaagacaataagtatagcgagattcgaattctcggtgaggaaccaataatcgtaacaatattatgaaaggtatagttttagcgggaggctcaggaacgcgcctttacccaattactaaaggcatctctaagcaactcatgcctatttacgataagccgatggtatattacccaatttcggtattgatgctggcaggtattcgtgacatactgatagtatcaacaccatttgaccttccgggattcaaacgactcttgggagatggctctgattacggtgttcattttgagtatgctgaacaaccatcgcctgatggccttgcacaggcttttaccattggtaaggactttataggtgatgattctgtttgtcttgttttaggcgacaacgtattctttggtagtggttttacggatatgctgaaagatgcagttcgtactgctgacgaagaacacaaagctactgtctttggctattgggtaaacgatccaaaacgttatggagtagctgaattcgatcgtaatggtaattgtctatcaatcgaagagaagccagtaaagcccaagagcaactatgcagttgtgggattgtatttctatccaaacaaaattgttgatgtagcatcaaagatacagccgtcagcacgaggagaatatgagataactacagttaaccagtggttcttgaatgacagggaattgaaagttcagattcttggtcgtggatttgcatggctggatacaggtacacatgattctctttctgaagcatcgacctacattgaggttgttgagaaacgtcaaggattgaaaatcgcatgtctcgaagcaatcgcctaccgtaaaggttggattagtgaagagcgcatgcgtgaacttgcacaaccaatgattaagaatcaatacggtcagtatcttttcaaggttattgacgaaatgaagcaagacattaattcaactaatatacttgataaagtggggaaataagatgaaaaaatatagtaatcactggtagtgtcggtttcataagctcactcgttgtacatttgtttgtgaacaaatccctaaagttataacatcatcaattaggataaatttacgcatgtaggtagctgggctaatctgaaagaaatagaagacaagcctaactataagtttgtgaagatggatatttgcgacttcaatgcattcctaaataatgaggcttggatggatagcattacaagtggtgaatataagagatattataatgtaatatgtggtgaaagatcgtaatggaaatgcttttaaggacaatattcttatttttaaactacttgaaatatcgtttaaaatataaggataatatttggtttcgtggatttgctgtgatttatgcagagaagggttcatcaataacatttagtaaggtaggtcgctctaacatattctcacacccatttagcaatatgattggtctttcgcaaagatgtatcattgttgcaagaatgggtggtaagataaatataggatctcatgtctgtatgagtggatgcacactctactccatagattcaataactgtaggtgaccatactgatattggtagtggatgtaagattatcgataatgatttccatcctctatcatatagtcagcgttctccagttgaacgtttagatttagtcaaacatcgtcctattaccatcggtgaggggtgcttcattggggcaaactcaatcattctgaaaggtactactctcggtaagaatgtggtggtaggagctggcagtgtggtgtgtggatcatttcctaataacgtaataattgctggtaatcctgcaagaataataaaggagaatgagcaataagtaatgatttttacttagtgaaatgatagcattgctttggcttcatttaataaaatctaagatttaatgggcgttaattatctcaagtgtgcatacatccaagaataaaggagatttaaataactagcgtagaaattggacgtttaccgaagtatgctacaacattcttgaggatattattgctatatggtgagcacttattttatcattatgaaaaaacttttaatgcttggaggtggtttccttcaaaattttgttattaaaaaagcacgtgaaatgggctattatgttttttgcttagatgcggacccaaatgcattgggctttttgtcagcaaatgaacatgcagttatcaatattgtggatgaagaagcatgtcttgcatatgctcgtggaaaaaatgtagatggcgtgcttacagcggcgactgattatggtgtacttactatgagctatattgctcaagaactagaactgccaggaattaattatgaagcagctaaaagaataaggaataaagcagctgttagaaaatgcctttttgatgcaaaagctgatgatacaggatattcttatgagatacataatgtagaggaagctgaaaagtataagaatggtattaaatatcctgttatggtcaaaccgtgtgatggttctggtagtagaggggcgtcaagagttgataggggtgaggatttgattgaggcttgtgaacttgctataaatagttctataacccatagagcagtggctgaaccatttattgtaggtcgtgaatatggtgtagagtcatttgtagataatgggaaaatttatgtattggcagtaatgcagaaagatatgacattacctccatattatgcagagctgggacacgctataccttctggtctttccttatccttagagaataaggtaaaaggatgcgtaaagaatgctcttatagctcttggagttaatcatggctctgtaaatatggatttgttgataaacagtaaaggtcaagtacatattgtggatattggtgctcgcatgggaggaaatctgattggttctcatataataccgacaggtacaggtattgattacatgggcaatatgattaaagctgctgttggtgatgaaactaactggactccagccacatctccgcagccagtcgctacgaaacttcttgctctaaaaccagggatagttaaagttctccctgattttgttaaaatcgagactgaatttaatgtaatagtggaacatcatcttcatgttggagactctatcacaccatatagaactaatcttgatggttgtggttatgttgtagcgaaagcatccacaatagaacattctatagaacttgcagcaaaagtaagacaaatgatcgatataactatattaagaaaataattatgtataagcactttttaaaaagattattagatattgtattttcattattggtctttccgctttttggcttaatattaattcctgttgcaatcgcaattaagttagatgatggtggtccggtattttataaatcagcaagagttggcaaggggtttcaaaaatttaatatgctcaaattccgttcaatgaaagtaaatgctcctgatttacgtaatgttgatggtggcacatataactctgctaatgattcgcgagttactaaaataggaaagtttttaagagaaactagtcttgatgagattcctcaaatattgaatatcataaaaggtgatatgagtattattggacctcgtgcgggcgattgggagagtgttgacacttatgaagatgatgagaaagataaggcaaaagttgtacctgggttgactggttattgtcaagcatattttaggaataatgcatctgtaagagaaaaacgattaaaagatgcttggtatgcgaataatgtaagtttcgtattggatgtgaagattttttttaaaaccattgaaactgtattgaaacacgagaacctttatactaactgataaaatggatagatttatcatagtagacagtcacaattctgaatatataggtataatatttcacattttacgtaaatgtggctacaacatggctttaacaaaaagattatttcattggattccttcttattcaaaacggaatatcagaagagactgccaaactaagactgtagtcttagtttggaatgaggaattaaatgattatacaagtacatttcaaatgtacaaaaatagtgatagtagtctttatataagaaagattgccaccttacctcaatatgaaggaaaaggaattgggaaaaggaatcttttgtatatagaacaatttgcaataaaaaatggatgttccagaatatgtttggatgtttatattaaaagtaagggagcaatatctttctattcacatttgggctttaaagaggtaggaaccaaacgttcaattaggtttaaggaacttataatgaaaaaacaattagattaatgtcattatgaaaatcttggtgttacctgcatattattatccggagcaagctgcaagtccttatttaggagacaatattcgtgaagctatgtgtaatgctggcttcatattagatctgtatgctccaatgccaacgcgaggagtatctgaagaaatacgtgttgagtataaagagcgtaaaatagagtacaaatacgataataaattagtgattcatcgttttcctatgtatagtgaaggaaaaaatcccattaatcgtgctttgcgatatgggatttgctggtgtgtacaatttgggaaaggattgtgtgccaaggatattgatttaatttatctagcaagtacacctcctattcaaggtgcattgggctgtttgctgaaaaaaatcaaaagagttccttttgtgtataatcttcaggatatctttcctgattctcttgcaggtaccggcttggtacgtaaggatggattgatatggaggatagggcgtgtggtagagaactttacttataagcatgcggacaagataattgttatttcggaaggtttcaagagaaatatcatggctaaaggtgtacctgaagagaaaattgtagttgtctacaattgggtggatcagaatgcagtgaagaatgttgcccgaaaggataataagttgtttgataagtatcatttggatagaaataagttttatatcacttatagtggaaatataggtctgacccagaatatggatttgctgctcgatgtggctagaagtttggaagacaatgaggaaatccagtttgtattgattggagagggggcttataaggagcaagtcaaggaagttattactcgtaataatatcaagaatgttactcttttaccttttcaaccatatgaagatattagccatgtgtttagccttggagatgtgggtattattatctctaaaccgggtgtgggtgaaaactcagtgccaagcaagacttggagcataatgtcagcatcgagaccggtactggcgaactttgatgagaatgagattaagactattcttagtgagaacgaatgtggtgtgtttacgaaagccggtgacaagcaggcatttacagatgcaattcttgagctttgccggaatagggagatgtgccggaaatatggtgagaatggtcgaaagtttgtaatggaaaatctgacaagggagattggcacgcaaaaatatatagacgttataaagagtgtggcgaaaggttagtttggctaagcagaaatgctgataaataaaagtgaatagttttataaaagtataattcaactatgaatatgaagttaaggaatattccgttttctccccctgatatgagcgatgcggaaatcgagatggtagcggaagcactgcgttccggttggatcactacaggtccgaagacaaaggaatttgaacagctgattgctatgtgttgtggtacggagaaggcggtatgtttgaactcggctacggcttgtatggaatcaatcttgagagccttgggtgtaggaccgggtgatgaggtgattaccagtgcatatacatataccgcaacggcaagtattacttgccacgttggtgcaaaggtggtgatggtggatacgaagcctgggtcgtttgaaatggattacgacaagatggctgatgctatcactgagcgtacaaaagtggttattcccgttgatctggccggtatcgtgtgtgactatgataagatatttgaggtggtggagagtaagaaatatctctttaagccagctaatgatattcagaatgcatatggcagagtgattgtgatggctgatgccgctcatgcatttggagcaagacgtaatggaaagatgtgtggcgcgattgctgactttacatcattctcattccatgcggtgaaaaacctgactacggctgaaggtggtgcgttgacttgggtgaaccgtgaggggttggacaacaatacactgtataagcagtttcaactgttaagtctgcatggacagaacaaagatgcactggctaagacgcagctgggtgcatgggaatatgatatcattgctcctttttataaatgtaacatgacggatgtgatgtcaggtatcggactggcgcaactaaagcgttatccggagatgttacgtcgcagacgtgagataataggtctgtataatgagggagtgaagggtacttgtattattccgttgaatcattatcctgataatgatgagggaacgtcttcgagtggtcacctgtatatctgccgattggagggtaaaactattgaggaacgtaatgcgattatcatcaaaatggcagagcggggcattgcttgcaatgtacactataagccgttgccgatgatgacagcgtataaagcactgggatttgatattaaagattatcctaatgcatatgagatgtatcataatgagataacgttaccgctacatactagacttacagataatgatgtggcgtatgtaattgaaaattttgtagatattgtaaagagtcactaataagagtctgttcgaaagtaagatgttgtatatattgtaaataagataaaagttttgattaatgagtaaaataaaaaaggtagccttaatatcaggaatcaccggtcaggatggttcatttttagccgagtttctaatagaaaaaggatatgaagtccatggtatccttcgtcgttcttcttctttcaacaccgcacgcatcgaacacctttacttggatgagtgggtacgtgacatgaaaaaggatcgtctggtcaatcttcattatggggatatgacagattccagttctttgatccgtattatccagcaggtacaaccggatgaaatttataacctggctgcacaaagtcatgtgaaagtatcttttgacgtacctgaatatacagccgaagcggatgccatcggtacacttcgtatgctggaggctgtccgtattcttggaatggaaaagaagacaaggatatatcaggcttcgacttccgaactattcggtttggtacaggaagttccacagaaggaaactactccattctatccccgttccccgtatggagtggccaaacaatacggtttctggattaccaagaactatcgtgagagctacggtatgtatgctgtaaacggaatcctgtttaatcatgaaagtgagcggagaggagagacttttgtgacccgtcagattacgttagccgctgcccgtattgcacaagggcttcaggacaaactttatttgggaaacctgaactcacttcgtgactggggatacgccaaggactatgttgagtgtatgtggctgattcttcagcatgatactcctgaagattttgtaattgccacaggcgaataccatactgtacgtgaatttacgatactggctttcaaagaagtcggtattgaacttcgttgggacggtgaaggcgtggatgagaaaggcattgatgtatcgaccggaaaagtcttggttgaagtcgattctaaatatttccgtcctgccgaagtcgagcagttactgggtgatcctaccaaggcccgtacgttacttggctggaatcctaccaagacttctttccctgaattggtgaaaattatggtatcgcatgatatgaagtttgtgaagaagcttcacatgaaagaactgatgaatagagaagaataagaatggataaagatacgaaaatctatgtagcgggacaccatggtttggtgggatctgctatctggagtaatttgcagagtcgtggttacacgaatcttgtaggacgttcccataaagagctggaccttcttgatggtgcagccgtaaaacaattctttgatgaagaacagcctgatgcagttgtccttgctgctgcgcatgttggtggtatccttgcaaacttgcagtatcgtgccgattttatctatcagaatctccagattcagcagaatgtaatcggtgagagttttcgtcataatgtaaagaaactactttttctgggtagtacctgtatctatccccgtgatgccgcacaaccgatgaaggaggacgctttgctgacttctcctttggaatatacgaacgaaccttatgccattgccaagattgcgggtttaaagatgtgtgaaagcttcaatcttcagtatggcacgaattatattgccgtgatgcctaccaacctttatggtccgaatgataatttccatttggaaaacagtcatgttctacctgccatgattcgcaagattcatttggctaaatgtctgaatgaaggaaattggaagtcagttcgtaaagatattgacttgcgtcctgtggaaggtgtgactggtagtaattctgatgctgaaatattggataaattggcaaaatttggtattactcctgaatcggtaactctttggggtaccggtacacctatgcgtgagtttttgtggagcgaagagatggctgatgcgagtgttcatgtattattgaacgttgatttcaagaatacctatacggaaggtagtagagacattcgtaactgtcatatcaatgttggtacaggtaaggaagtcagtatccgtgaagttgccggaatgatcatgaaagaagttcaatttaagggtgatttgcgttgggatagttctaagcctgatggtacgatgcgcaagttgacagatgtgtcgaagttacacagtttaggctggcatcataaggttgagattgatgaaggaattgagcgtctttatgaatggtatttgaaaggtgtctaaattttataatttatatattatggaaaaattgaatggaaagaatatcttaatattgttgttgactttgctttttacagcttgccagtcttataaaaaagtaccttacttacaggatgcagaagtggtactgtatagtactcaggatgcacaattgtatgatgcaaagatcatgcccaaagatttgttgactattgtagtgtcatgtaccagtcccgagttagctgctccttttaacctgacggtagctacacaaggtaatatggctttgaactataccaccactcagcccgctctacagcaatacttagtggataatgagggaaatattaactttccggtattgggtgaacttcatgtaggcggattgacgaagaaggcgaccgaacaaatgattgtggaaaagttgaagccttatattacggaaactcctattgtaacggtacgaatggtaaattataagatttccgtgattggtgaagttgcccgtcccggtacattcacgatctccaatgaaaaggtgaacatcctggaagctctggctatggcaggtgatatgaccgtatatggtctgcgtgatgatgttaagctgatacgggagaatgccaatggtaagcaggaaattattcctttagatctgaataaggcggagactattctttctccttattattatttacaacagaatgatattatttacgtaactccgaataaggcgaaagctcgaaattcggatatcggaactagtacaagcttatggttctctgctacttcgatccttgtttctattgccagtttgttgtttaatatcttgaaataaaaagaaagagttatgaaggaagaaaatcaaaacgtgaaggaacgtgaaatggctgaggatcagatcgatttccaagcgttgctttttaaatatattattcattggccctggtttgtaggggcagtgttactatgccttgttggtgcgtggttttatctgcattgggctacacctgtttataatatttcagccactgttcttatgaaagatgagaagaagggtggaggtgcaggactttcttcggaattggaggatatgggattaagtggtctgatgacttcttctaagaatattgataatgagttggaagttttgcgttcgaaaacgctcgttaaagaggtggttaatcaattgggactgtatataacttatgcagatgaggatgaatttcccgctaaaggtttatataagacatctcctgtccaagtgagtttgactcctcaagaagctgagaaactaagttctccgatggtagtagagatgactttgcaacctgaaggtagtatggatgtgaacgtgactgtaggtgagaaagggtatcagaagcattttgaaaagttacctgccatttttccaactgatgaaggtacattggctttctttcaggaagttgattcggtaactttacaggatggaacgaaggttcctcggatagagcagagtgtacgccatataactgcgacaataaacaaaccgatgagagtggcaaaaggctattgtaacagtttgtctattgctcctacttctaagactacttctgttgccgtgatttccttgaagaactctagtttgcagcgtggacaggatttcatcaatcagttgcttgaaatgtataatcgcaatacgaacaatgataaaaacgagattgctcagaaaacggctgagtttatcgatgaacgtattggtattatttcaaaagaattgggtagtacggaagcggatttagagtcttttaagcgtgacgcaggtatcacggatttgacaagtgaagctcaaatcgccttggccggtaatgctgagtatgaaaagaagagtgtggagaaccgtactcaaatcagcctggtaaatgacttgcgtaagtatttgagaagcaatgaatatgaagtattgccgagcaatgtaggtttacaagatgctgctttgatcggtgcgattgaacgctataatgaaatgcttgtggaacgtaaacgtctgttacgtacatcaactgagaataatcctgctattgtgaatctggatacaagcatacgtgctatgaaagccaatgtgcaagctactcttgaaggaactttgcaggggttgatgatcactaaatcaaaccttgactgtgaagcgagccgctattctcgtcgtatcagtaacgctccgggacaggaacgtgcttatgtaagtattgcccgtcagcaagaaatcaaagcaggattgtatctgatgttgttacagaaacgtgaagagaatgctattgcgcttgctgccactgcgaataatgcgaagatcattgatgaagcgatagctgacgatattccggtatcccccaaacactctatgatctatttgattgcattgatgcttggtgttggaattccggttggcatcatttatttgattgaactgacgaaattcaagatcgaaggtcgtgccgatgtggagaaactaacgagtgttcctgttgtcggtgatattccattaactgatgagaagaatgataagaatggctctatcgctgtcttcgagaacaagaataatctaatgagtgaaaccttccgtaatattcggaccaatcttcagtttatgctcgataatgatcagaaggtgatccttgtgacctcaactgtcagtggcgaaggaaaatcattcgtttcgtcgaatttggctatcagtctttctcttttgggaaagaaggtggtgattgtaggtcttgatattcgtaagccgggactgaataaagtatttaatctttcgagcaaggagaaagggataactcaatatcttgccaatccggaaatggatttgatgagtttgatacaacagtccgatgtgaataagaatctgtatatccttccgggtggtaccgttcctcccaatcctaccgaactattggcacgtgatggattggacaaggctattgagattctgaagaagaattttgattatgtcattcttgatactgctcctattggtatggtgactgataccttattaattggtcgtgtggcggatttatcagcatacgtatgtcgtactgattatacacataaagcggaatacacattgatcaatgaattgtatcacgaaaagaaattgcctaatctttgtactatcattaatggtgtagacctgaagaggagaaaatatggctactactatggctatggcaagtatggtaagcattacggttatggtaaacgttatggatacggctatgggtatggtcaagaaaagaagaagtagatatttggcaatctatactatcaaggactatgataaggagtttcaactttatcgtctggctttcccaaatgatgaggttcgttatggtttctttaactttctagttccttattacacaccggtgaatgaagatgaacagaatttctatataggcaaattcgttcaggaattgcgtgtcggagaggttgatgctttccttaaaggaatatagaccgatagttaaggaatgttatgcctgactagctatgtgtcgttatcgtaaatataaacctgagtccgatagaaagaagtttggttgattgcgtcaacagttcttctatcggtctcaggttgttttatttaaacccgtttttcaatgtaaatatctcaaacgtttttaatggtatgagcaggtgtttttccgaaatgcttcttataattatcgcggaagtgatccatatccttcattccgatattctctggtatttcgtttacgcgatatttcccactctctaacatttcatgtgctttttccatgcggattttgagaatgaatttgttaagtgcttcacctgttaattgcgtccacttgttgtaaagactggtcctgctaattccaagctctttggcaatggagcctatggttagtttttcattattcagattctccagaatgattttagtaactttacttatcaaagggtgttcaccatcctgcaatatttctgacgcttttatctccaaaaactcttctccaaacaatcgttgtagaaatgattttcgaagaaaacgattgttcttgataaggattgacatttcaatctttaaatctgctatactaaagggctgttgcaagaatgtatcagctaaagaagtctttcttctattgtattggtcaatatctatatgcgaactataaagaatgataggtatgattgatgtttcgcaggatgttttcaatcttgacgagagttcgacaccatccatgttctgaagttctgtatcacaaatcactaaatcaggatattcattttttatgcaggtcatagcttcgccgccatctctgaaacttttaatagtaaattcttccgttaaacaacttgtcagataggatcggaaatcatcattactgtcggcaagtacgactgtcggtttgtgggaatttcttttgcagggagcctttacgagcaaacggtctatcttttcaatttcagtatgattggtgaaacacagcggcgaatgatttgattggtcttcacaagagcatttcacaggaaatcttaatgtgactgtatgatttatattgcttactaagatcttgccattacacaaatctgctagtttcttcaataacatgcttttggaaaaatggcattcaaattctgctttctgtcttatcatccggtgtttattctgattataaagctttgttagtttaccatttcctgaatcgggtacacttatttcccaatgttcctgactgatagaaattagcaatgttatgtttgactccggctcagaacagtcgatcgcgttcgttatgaatttatcgataataggtgagattttgtttttgtccaaccatacactggcataagtgaattctgtcttgattattatttttatgtgtttgttcgttgcataaccttgtagggagcaaattctgtttcttaaatagtttcctaattcatgttcggtaatgtttaggacttcgggatgattatgcaaatattttaatccggacaatttgtccagattctcatttaaacattctatatttcgaatagccagtgacaaatcattctttatgttctcgggacagttatcattacagatcgttcgtaaaggaacatgaactaatgtaattggatttcgaatactttggaaagaatctataaaatactggttctcttctttgaggaaatttctttctttttgtatggaaagataatgaaataaatgccagtagagaaagaaacctgctactatcagcaataaaactaaatatgattgattttcaaatattgttgctattaagaaagatgcagcaatagatattgtctttaaatacatcatgttattatattttaaatgacgtcactcgatggagtttgctttttctttctgattcaagagacatgaaagattatgtgccaactatgattccataattgtgcacatccataaactcaaataatatgatctctaatttgtttgttttgggggaggtcaatatttggttatgagttatgcttattgagaattcagattctaaatgtcttgaactatcaataaaaaagcaatgtcccccaagtaacaataattattttcatttatttgtattaggcgtagtaaactagcctcaggtgaataatcaggggaggaggtggtctaatattaagtatgctatcggaccatgatgtctcaatagctgtttgtttgtgctcaatcatgaattaatatcaaataaaatacatttgtccccttctgataaagtaggaaattgtatttacgatgtaaatgtaacttgtaataacataaaaacaatagttttgtttgtgtgatttgacgaattgttgtagaattatttatttaattgattaatcgaagcagaaagttgtataatagatttagattaatactaaatgtattgtatatgaaatgttggaaattctatatgtaagatggaatgactggtttttgttttaaaatatgaatataaatatttgatattatattgtacttatatgtattaaaaggtgataaatatgcaccttcgttcggtaaatatcgaaggattggggtgttttttcctgtctgcccaaagtaaaggtgaaaccccgaatccaggtggtggatcgggtgacgatgatgaagcatcggactcgacagtataatgggaaagtaaggtagctcattacaacagagtgattataaggatggggcttcggcctcattctttcttataagcttttcgaaagctaattaaagtttcgacttatttacaagtaaataagagtatgcaaataacaacaatccttgcttttattactgctatgggcggtctggaagcggtgaatggatagtacgatatatcttctgtcgtaagacggatgtcagaaaagaggaagcttcggtctgtaatctggaagaagaaaaccgacgtaagaaggtggactggctggaagatcgcttgactcagcgggatgaaaaaacagatggcctctatatcgaacttcgtaaggaacaggaggagaaaataaactggatacataagtgtcatgaagtggagctgattaaaaaggaatctgaagtgaaaaagtgtgagattagaggatgcacccaaaggtttgcttcagcaggtggttgccggtagcggatataggtggatgaagagatatataataagcattgattaatgaacgatattaaaaatcgaaagttatagtaatggaatatagaaataatgattatctttgaatcacaaaaaatgaagaataatgatggatggcataatgcgtaaacttccaattgggatacagacttttgagaaactccgcgaagggggatatctttatgtagataaaacggcttttgtatggaaaatagcttctacagagactccttatttcctaagtcgcccccgtcgttttggaaaaagtcttcttctttccactttcgaagcatactttgaaggcaggaaggaattgtttgaaggacttgctgttgccgaacttgagaaggaatggaagaagtatccggtgtttcatttggatttgaatgcagaaaaatatgattcatcccaagctttggttgagattcttagccggcatttgacgcaatgggagttgaaatatggaaaaggagaggatgaggaaactctttccggacgttttgcaggagtgatccgtcgcgccagtgaacaggcaggctgtggagtagtggtattggtagatgaatacgataaacctctgttgcaggctttgggtaatggttctctattggatgattaccgtaggactctgaaggctttttatggagtattgaagagttctgaccgttatctccgttttgtatttctgacaggtgtgaccaagtttgcacaagtcagtgtgttcagtgatttgaatcagttgaatgatattagcctggattttgcttatgctacattgtgtgggattacaaaggaagaacttggctcaacttttgttcctgaactggagcgacaggcggcagtcaatgatatgacttcagaagcggttatggaaatgatgacacgacgatatgatggttatcattttcatccgaaaggtgcgggtgtgtttaatccgttcagtgtgctcaactcattttcaaaacaggagtttggtagttactggtttcagaccggaacacctactttccttgtcgagttgctcaaagagagtgattatgacctgcgcactttaattgatgggatagaagccagtgcatcttcatttatggaatatcgggtggatgccaacaatccgattccgttgatttatcagagtggttatctgactatcaaggactatgacaaagagtttcaactttatcgtctggctttccccaatgatgaagtgcgttatggctttctcaattttctggttccttattatacaccggtcaatgaagatgaacagaatttctatataggcaaattcgttcaggaattacgtgccggagaggtagatgccttccttacccgtcttcaggctttcttcgcagattttccttatgagttgagcgattcgaccgaacgtcattatcaggtcgtgttttatttagtgttcaagttaatggggcaattcaccgaagttgaggtccgtagtgctcgtggacgtgccgatgcagtggtgaaaacgcctaaatatatttatgtgttcgaatttaaactgaatggaaccgctgaacaagctttgcagcagattgatgagaaaggttatttaattccctatcaggcagacgaccgtgaagtggtgaaagtgggagtggagttcagtgcggagaaaaggaatatagatcgatggctgttgtagtgcggagatatgccaggcatgttttcgcaaattttttatatatatggagaaaaaacttgtccaaggttgattattttagcttcccgtttcctcttcctgtcccttttttcgtcttaactagcttttctttcttataaatctcttcccagtactctttaatcatgatttaatcttgtcctttcattcctaatgaagatggcgcatctttgcatcgttaacgttagcgaagtaataatcattagtatttatcttaaaaagaaaggaccaaaattatggcaattagatttagaagagtgtctcgtttgtgtgaccctaccaacaaagaattaggaaagaaagtgtatccggtaatctcttatcaatacgatacgagtgcaactttgaaagaaattgcaaaagagatttcctccaattcgggagtaagtgagggtgaaacaattagtgttttaaaggactttcgtactttattgagaaaaacattactggcggggcgttcagtaaatatcgaaggactgggttactttttcttgtctgcccaaagcaaagggacagagaaagcggaagactttacctcagctgatattcaaggattacgcatctgttttcgtgccaactcggatattcgtctgtctaccggaacatcaactcgttcggatggcttgaaattcaaggatctggatcatattaataaatcggatgttatcggaggaaatccggatgacgggaatgatggagaaaacccgaatccgggtggtggatcgggtgacgatgatgaagcaccggatccgacagtataatatgaaaagtaaggtagctcattataacagggtgattataaggatggggcttcggcctcattctttcttataagcttttcgaaagctaattataaagtctcaacttaactataagtaaataagagtatgcaaataacaacaatacttgcttttattactgctatgggcggtctggaagcagtgaaatggatagtacgatacatctcctgtcgtaagacggatgccagaaaagaggaagcctcggtctgtaatctggaagaagaaaaccgacgtaagaaggtggactggctggaagatcgcctgactcagcgggatgaaaaaatagatggcctctatatcgaactgcgtaaggaacaggaggagaaaataaattggatacataagtgtcatgaagtggagctgattcaaaaggaatctgaagtgaaaaagtgtgagatcagaggatgtacccaaagaatgccaccttcggattattaaataatgactaatatatgaatatcatgagaaaaatagattctattattatacattgttcggctacaaaagtcgggcaggattttacagcagcagatattggccgttggcatcgtgaacgtggatttaatggtatagggtatcactatgttgtctgtctggacggaagattggagagagggcgggatatttctttggcgggggctcattgcaaaggctggaatgagcatagtatcgggatatgctatattggtgggctggatgtaaacgggcatcctgcggatactcggacgaaggctcagaaaagggtgctttatcaattgatcatggatttgcagaaagagtatggtatccttcaggttttgggacatcgggacacttcgccggatttgaatgaagatggggtaattgaggctaatgaatacgtaaaggtttgtccttgttttgatgtgaaggagtttctgagaagtgggagggaagccttgtttgtatggttggtggctttaatgattccttttttgtgcttggggtgcagaggtaagaaggagattgtctgtaagagccgggagattaaagttgattcgagttctacggtcggacgcaggaacagtttgcttcagcaggctttcatttcgagaagtgattcggaagtagtggaagagcatttggaacagatcgttttcatatatcctgtggatacggcttcgcaggtttctgtgaagatcatgaagaattctcttgaccgaaggacagggaagctgcagcaggtggttgccggtagtatgtcagcggaagaagattctctgtctttggagtccggggtagagttcagaacgagtgaagaggtgaagaaaactgtttctgtgaaacgtgtcaataggtggaaaagagggatatttatattggggggaatagctctgatttatggtggatgtagatggatgagaagatttaaagtataaaccgacctgtgaatttcaacttccatctttttttagtaattttgcccaatcaactcaataacaaataaataatggatgaattaaacaatggggaacaagggcaatatgttgaacccgggaaaaatgagaagaaaaataatacacgaaaaattgtaaaaaggactttgcttacggcaggactagctttggctgtatacatggtatactccatcgtttatctgtttatttcgcccgaccgtaatattcagcagatctatctggtgccggaggatgcggcatttattattcagtcatctgctccgattgaagattgggaaaagtttagtggaagcgaaacctggcaatgtctgagaaaagcgaaatcatttgaagaagttgcgaagagtgtagaaaagcttgactcggttgtcaaaagcaataaagtgctgttatcactggtcggtcagcgggatctgcttatctcacttcataagacccgcgctaccgattgggattttctgcttatagtagatatgcagaaagcttctaaaatggatttattgaaagatcaggtcgaaacagtgctggcaatgtccggctttaccgtcactaatcgaatgcataatggaattaacattcttgaaatgcgtgatccggatacccgtgatgtcttttatactgcttttgtagataatcacctggtaggttcttatacttccggactcgttgaatctgccatcaactcccgtaataagcctaagatcggacttgaccagtcttttattgaaacggaaaaattagtttccggtaaagggcttgtcagggtatttatcaactatgcccgtattcctcagtttatgtccatttatctgggagcgagaaatgaatatgtcgatctgttcagtaattctatgaattttgcgggcctttacctgaatatggataaagaccggatggaggtgaaaggttatacgttgaagaaagatgcggtggatccttatatcactgccttgctgaattcggggaagcataaaatgaaagctcacgagattttgtccgggcgaacggctctttatacaaatatcggctttgatagtccggtaactttcgtgaaggaactggagaatgctctgtctgttcatgataaactgttgtatgactcttatcagagttcacggaaaaagatagaaagcctgtttggtatttctctggaagagaacttcctgagctggatgtccggagagtttgccataacgcaatccgaaccggggttattaggacatgatcctgaagtgattctggctattcgggcaaaaagcatcaaagacgcccgtaaaaatatggagtttattgaaaagaagatcaaacgccggtctccggttaagataaagtctgttaattataaggactttgaaatcaattatgttgaaatgaaaggtttcttccgtctgttcttcggaaagctgtttgataaatttgagaagccatattatacttatgtggatgattacgtcgttttcagtaataaagctgcttccttgctttcttttgtagaagactatgagcagaagaatttactgaagaataatgcaggatttaaggatgcttattcgtatatgaaatcaagttccacaatcttcttgtatacagatatgcacaagttctactcacaattgaaacctatgatgaatcctgctacatggaatgaaatacaatcgaataaagatgtcttgtattcattcccttactggacgatgcaggtgatcggagataacaatctggcttctctgcagtatgtgatggattaccgtccatacgagccggaagaggtagttgccgttgtcagcgatgaggaagatcaggatatggacgaagaggctgtgaccgaaaaggagcagatgagcgagttaaagcgtttctatattgagaagtttgaaggaaatgttctgcgtgagttctatccggaaggagcactgaaaagcgaagcggaagtgaaagaaggaaaacgtcacggacgttatcgtgaatatcacgaaaatggaaagctcaagcttcgtgggaaatattcaaataatcagcctaaaggcacatggaagtattacaccgaggaaggtgaatttgaacgtaaggagaagttttaaatgaacttctcctgataggtatatatcttatttaatattttcttctgtgctgggacaagaagttatctataaagcggacgatataaacgacagcaactccggctatgaccaatacgataatacgactcaacatagtttttgattttatatttaacggtgtacaaagataaataagatatatgatatatgggatatcgggataagaaaaaataattcaaccctagaacaggggtctgaatagtacttttataaattactgatttctagctataaagaaaaatatgaataaaaaagtgtcgaaaagtttttgagttctcgcaaaaagcactacctttgcatccgcaaataaggatggttccgtagctcagctggatagagcaacgcccttctaaggcgtgggtcaagcgttcgaatcgcttcggaatcactgatgtaaacgttgattatttaataatagtcaacgtttttcttttgtttggggtacatcaattttattgaattctgagtggtttcatattgcgattatcccctataaaacagtaaatgtccccctatgtccccctttactgtatactatattgatttgataaacaggcaaatatttgatttaattaagaatatatttataccccctattttataaagcaactcccattattattcctacatttgcattcagagattcgtctctttagttgggaaacataaaccttttgttcatgaagcatttacgacaaactttactttttatattattaggattcttattgagtgcttgtcgtcatacagccgaccgattgttatctatcgaacaattaatcaggctgaaaccggacagcgccctttctttgcttcgccaaattcagtatccggagaggctgtcggattcaaatggcgctttatatgcgctgctaatgacgcaagtgattaatcagtcatctgatgaggggcataaaagtgattcacttatatctgttgcaatcgattattataaaggtacgaaggactctgctcatgcggcactggcttattataatgccggtctggtagcaatggataatgaagattcggaagcttccctgcataatttcctaaagacaatcgattggttgggagagagtgataacgatgaacttcagttcatggtcaggtataaaatgagtcgtcttttcaacttgcgactgattcctgacgaggaactacggttggggaaggcagcgttaccttatgccgaacggattggtaatcctttgtatatctgtgcactgttgccatatatcactcacggatttatgcagacaaatcaactggatagcgcctataaatattctgtgcaagcgatacagctggctgagaaagagaatctggtccggacattatcacatatttattcacagcatgcccatctttgcatggcaatgaaggactataaacaggcgttgatgtatcgcgataaagatttggctattctatttgaacttttcggagaggaaaatgaatatatctatgatcattatataaataaggcaaacacactgactgaactgcatcagtatgattctgctttctactacattaataaagcggtggaagatacaacagatatacaatatacaactcgaaagtctttggctaaggctgaaatttatgctgctaccgggcagatggattcggcatattattatatgaaccgacatgctgacttgcgggataggctcatagaggagagagataaggaaggtttactgactttgcaccggaattatcacaatgatgaattgaaaaaagccaatacccgtctttggcaacaggcggtggaaaggaagctgcaactgtacgttgtgactattgtttgttgcctggcgattttgttaggggtatgcatctacttctttttatataaaaggaaacaacaggaagtattgcgtcagaaaggacagattgcccatcagcaggagttgttgaagtaccgtgaaatagaaaaactacaggcagaaaaagacttgtcggaagctaaggaaagggaagcgcagattcgggagaaagaggctttactaaaggttgagttttttaagcgcctgaatgaaacttgtattcctgtgattgaaaatccgaaaacccagcagaatataatgctcaaggatgaggactggaaagtaatattcaagaatgccaacagtatcttcctgaattttacagaacgtctgaagaatcagtatcctgcactgaatgaggaggatttgcggtattgctgtatggtgaaaatgcagttttcgcagactgatattgctaagatcatgcatctggagaaagattcggtgaagaaaagactgaaacgaattcgtaccgaaaagatggggatagcgcaggaaacaacattggaggctgtgcttcgggacttttaaatgattaagaatgagaatgaaataatttgttaaaccaaacattagaattatgaaacaaacactgagttttcatagtccgatcattgcttctacacagagcaaggtggatgtagaagcttttgagaagagtacagatgcttttgaaaagggagagcacttacagtctttttatctgttgctggattatattgatccggagttacgcagcaaatttggtaatgcagaagggacagagtttgccgtacctcatggttccattatggtctatctgaggctggagggtgaccagctgaatattacagctccatttctgttgttgccggaaaaggggaggattcctttgctgcgccaggtggcagctttgaatctgacagaactgacgttagcatgtatctctttgcagaatgataagttgttctttgactttcattgtccggtggctttatgcaatccttacaagatatactatgtgcttgaggaaatctgccggataggagataagtatgatgacgaatttgtgactaagttcaaggccgagcgcatttatgagcccaaaattactccatacgacaatgaaacggtggataaggtatacgaagccctccagcagagctgtaaggaatgtatggacgctgtaaaatacttcgagacagaacgaaaatatggttatgcctggaatatattatccagtacgcttcttaaaatatgctattttgtctgtccgcaagggcaactgctgaatgatcttgataaagcgattacagatcatgggcgggaggatatgccgttgccggagatcgtatcccgtaccaaatctgttgtcacacgccttcaggaaatgacgaaggagcaactggctgccgatctttactttgttgaaactttcatttcggacagacgccgttccgtactgaaaaacattcaggataactttgaagatacatacgagaaagccggctcggcattggaatcaggtgacttcatcgtttgctgcctgcttattattaataaattctatgaattgtactattataataatgtgcagaatgatgtgaatgcggtagttgtgaaagcaatgaaggctacctctgccatgtcatgggaagaagctgctccgatattatatgaagcgatggataatatcatggaaggagaactggatgtagatgatgacgaagaaggtggtgacgaagacggagaaacaatgggcttcgatacgtcacagcttcaacagatgcaacaggaaatgatgcagcaggcgatgcagaatattgatatggagcaaatacagaagatgcagcaacttgctatggagaatatgcaaaagatgatggccggtatgtatggcaacaataacaatacggaagaggacactaacaaataaagaacaagactatggaacagaatatatacaatgccatttataaagtgaatcatgccggtggctgcggcagttgtttttatctgaaacaatatgatctgtttgttaccaattatcatgtagtagagggattccgtcaggtagcgatccaggataatgataagaattcgtttctggccagggtcgttatggtaaattccgtattggatattgctttgctgtcggtggaaggggatttttctgctcttccggatatccggttatcggagttgaaagaagtcgcgatcggacagaagataaacgtggccggctatccgtttggtatgccgttcacagtgactgaaggtacggtttcttctcccagacagctgattaacaacagttattatattcagacagatgctgcggtcaatccgggaaatagcggaggtcccatgttcaatgaacgtggtgaattgatcgccattaccgccagtaagatcaccgatgcggataatatgggatttggtatccctgtggatacactgaaaaaggtactggagaatatagaaagtctggaccgctctgtttttaatgtgcagtgtaatagttgcgatgaattcatttccgaagaagatgaatattgcccttgttgcggtgacaagttgccggaagaaatctttaaagagaggggactgaccgatctggctgtattctgcgaagaagccattgaagcgatgggaatcaatccggtattggcacgtgtgggatatgaaggctggaaattctataagggaagttcggagatacgtatgtttgtgtacgaccgttcttatttgtttgccacctctccgctgaatattctgccaaaaaagaatctggaacctgtgctgacctatttacttcagacagagattgctccttatcgtttcggactggatggaaatcagatttatctttcttatcgtgtgcatatatctgatatattctccgattattcggaaaatgtcaagacgaatctgacccatctggctttcaaggcagatgatctggataattatctggtggatacttttggctgtgagttttccgaatatgctaataaaaacgctatctgaccaataactaaactatttgaatatcactcctttcgctgaatcattgaggcggaaggagtgtcttttttcctccctgccggacactcgcaaatctatttttacgaagaataacgaacgttatataggtttcaaaaagctcaaaaaaggtaaaatgatgttgcgattctctgttattacttatacttttggacgattaacaactaaaaaacacaataaagttatgaagaaattgatttttttatttgcattttgccttactgtgactaacattttcgctcaaactgaccctagccaattgaaaaaagaaggaagcgacgcttttaatgccaagaactatcccgtagcttatgctaaattcagtgagtatctgaaacaaacgaataaccaggattctgcaatcgcttattactgtggtatggctgcagatgaagtgaaaaagtatgcagaagctgtgactttctttgatattgctattcaaaagaaattcaatataggtaatgcttatgcccgtaaagcgctggcactggatgctatgaagaagactgacgagtatgttgctaccttggaagaaggtctgaaagtagacccggacaataaaacaatgattaagaactatggtctccactacctgaaagcaggtattgctgcgcagaaagccggaaaagctgaagaagcagaagaatgctttaagaaagtgattcctttggatcataaaacatataaaaccaatgctttgtatagcctgggcgttttatgctataacgacggtgcgaatatcctgaaaaaggctgctcctctggcaaactctgatgcagacaaatatgctgcagaaaaggaaaaggcagatggcagatttaaagaagctataggttacttggaagaagctaccaaagtttctccggaagatacaaagtctaaaactatgctttctcaagtgcaagcagctatgaagtaaactaccaattccagatagaaagggttgccggggaacattttggcaacccttttttattgcttttttttttgaatgatctactttttgcgtacttttgctttcccaaaaagaaagactttatgcaattatatacaagagaagaaacgattcggaaaataaaccatttagggcaatcctgccggccttttatttttattattaattatttgcaggatgcatcttatatagaagaagttgcctctgttgacccttctgaagtagtatataacctgaatgggtttaccaaccaatcttcatcgaaggatgtgctttcttgttttgaagaacctgtccactggaattcttatcccgaatctttcgatagttaccgtcggtcatttgatatcgttcaacggaatatatttgccggaaacagctttctgaccaatctgacatgccgcacgccgatagagacgaaccttagtctgaaagatattttcttccgttcaaaagcaatgtataaattgtgggtcagggatcagttcacagttttctctcccgagatatttgtcagaatccaacagggaaaaatcagttcttatccgatgaaaggtactcttgatgcatcattgccttcggctgtccggcaactgatggatgatccgaaagaggctgccgaacatgctactatcgtagatttgatccgcaatgatttaagcatagtggccgatcgggtatctgtgtcccgatacaggtatattgataagttgcagacgaatcgcggaactattcttcagacgagttctgaaatacagggaaccttgccggataattatcgggaaaatctgggacacattcttttcaaactcttgcctgccggttctatcaccggtgctcccaagaaaaagacgatgcagattatcagtgaagccgagacgtatgagagaggattctatacgggtgtgatggggtatttcgacggaagtagccttgatagtgccgttatgatacgttttgtggagcaggaaggcgacagaatgtattttaagagcggaggtggaataacctgccgtagtgaagtggaaagtgaatatcatgaaatgaaacaaaaagtatatgtgccaatttattgaaacgattcgcatagaagacggacaggtttataatctgtcgtatcacacagcgcgcatgaaccggactcgtgccgctttttggaaagaagcggctcccattgatttgtccggctttatatctcctccgtctctgtccggtatctggaagtgccggattgtgtacggtaaggaaatcgaagaggtcggatacactccttatcaaatgagaatggtttcttccttgcgtccggttgcttcggacactattgattatagttacaagagtaccaatcgggaagaattgaatgatctgtttgcccggagagggaaggcagacgatattctgatagtgaaagacggatatctgactgatacctccattgccaacatagcgctgtatgacggacatacatggtatactccggctcatcccttgcttcaggggacgaagcgtgcggaactgttggataatcggttcatagtggagaaagatatccggcaggcgcaattgggcgattactcccatatcatgttgttcaatgcgatgatagactggaaacggctcatcatacctgtcaatgaaaaatattttattctataactaaaattaacggaaatatatacagaaccgttgaacaaagcctctttttaatctgttatatttatgtgtttttcatagtattagataaagattaattaaaagagattgtacttcacttgtgaaagcttagagtacatcagaagcagaagagtctgtttttttgataaatgtgttagagcatcggttttaccaggccgatgctttttttatgtccttttgttgcgttttgtagtttatatgaaataaaatttgtacgtttgtagggtaataatagaaaatgatgaagatgaacatacccgttatctttcagtttttaaaagatctttctgcgaataataatcgtgagtggttcaatgagcatcggtcagaatatgaagtagcccgtgccgagtttgataactttctggcaacagtaatcgcccgcatttctttgttcgatgaaacaatccggggaatccagcccaaagattgtacctatcgtatttatcgggatacccgcttctctgcggataagacaccctataagatacattttggcggttatatcaatgccaaaggcaagaagtccgatcattgcggatactatgtgcatctgcagcctgacggaagtatgcttgccggaggaagcttgtgtttgcctcccaatgtactgaaagctgtccgccaagccatttatgacaatgtggaagagtatatctccattgtagaagaccccgaattcaaaaaatattttcctgtagtgggagaggacttcatgaaaacagctcccaagggattcccgaaagattttaaatatattgattatctgaagtgcagacagtttgtctgttcttatcttgttcccgatgattttttcactcgggcagacacgatggagcagatagagaaagcattccgacagttcaagagatttgccgatttcatcaattacacaattgatgattttgaataaaataatacctaaaaatataaacttaaaaattaaactcatatggtagtagatactttagaaaatctggaaaaatacgcgtctttgaatcctttgtttgcacaagctattgagttcttgaaatctcatgacctccaagccatggaaataggcaagactgaactgaaaggaaaagatctgctagtgaatatcgcacagacaaagcctaagactaaggaagaggcgaaattggaaacgcataatgaatttattgatattcagatcccattgtcgggaacagaagtgatggggtatactgctgccaaagattgtgtgcctgccgacactccttataatgtcgaaaaagatattactttctttgaaggactggcagagacatacgtagccgtgaaaccgggaatgtttgccatcttctttccgcaagacggacatgctcccggcattactcctgacggagtgaagaaagtgatcgtaaaagtaaaagcataaacctaattcaattctgatatgaaggagacactcaacattatcaaaaacgatccctggctggaacctttcgcagatgccattaccggtcgtcaccagtatgcactgaacaaggaagccgagctgaccaataaaggaaaacaaactctttcggactttgcatcaggctatctttattttggtctgcaccgtactcccaaaggatggacgttccgcgaatgggcaccgaatgctactcatatttatatggtaggtacattcaacaactgggaagagaaagctgcttataagctgaaaaaactgaaaaacggtaattgggagatcaatcttcctgcagatgccattcagcacggagacttatataagttgaatgtgtattgggatggcggacaaggtgaacgcattcctgcatgggctacacgtgtggtgcaggacgagcagaccaagatattcagcgcacaagtctgggcaccggaaaagccatataaattcaagaaaaagacatttaagcctactacgaatcctttgttgatctatgaatgtcatattggaatggcacaacaggaggaaaaagtaggcacatacaatgaattccgcgaaaaaacacttccacgcatagcacaggaaggctataactgtattcagattatggccattcaggagcatccttattatggtagttttggctatcatgtatccagtttctttgctgcttcctcccgctttggtacgcctgacgaactgaaagcgctgattgatgctgctcatgagatggggattgccgttattatggatattgtccattctcatgcggtgaaaaacgaagtggaaggtttgggcaactttgccggtgatccgaaccagtatttctatccggctcctcggcgtgagcatccggcatgggattcactatgctttgattatggcaaaaatgaagtgatccatttcttattgtccaactgtaaatactggctggaagaatataagtttgacggattccgttttgacggtgtgacgtctatgttgtattatagccacgggttgggagaagcattctgtaattatggagattacttcaatggtcatcaggacggcaatgccatttgctacctgacattggcgaatgagttgattcatcaggtcaatccgaaggctatctctattgctgaagaagtttccggtatgccgggacttgcggccaaagtagaagatggcggttacggatttgattaccgtatggctatgaacatccctgattactggatcaagactatcaaggaaaagattgacgaggactggaagccttccagtatgttctgggaagtaaccaaccgtcgacaggatgaaaagacgatctcttatgcggaaagtcatgatcaggcattggtaggagacaagactattattttccgtctgattgatgcagatatgtattggcatatgcagaaaggcgatgagaattatgtagtcaatcgcggaatcgctttacataagatgatccgcttgctgacatcttcgacgatcaatggcggttatctgaactttatgggtaatgagttcgggcatcccgaatggatcgattttccgcgtgaaggtaatggatggtcttgtaagtatgcccgtcgtcagtgggatctggtagataacaagaatctggcttatcactacatgggggactttgatgctgagatgctgaaagtgatcaagagtgtgaaagatttccaggcgactccggtccaggagatctggcataatgatggtgatcaggtattggcttatggacgtaaggatctgatatttgtatttaacttcaatccgaaacggtcttttgtagattatggtttcctcgttagtccgggagcttatgaagtaatcttgaatacggataatgttgcatttggcggaaatggtcttgcagatgattcagtagttcatttcacgattgccgatccgttgtataagaaggaaaagaaagagtggctgaaactctatattcctgcacgtacagctgttgttttgagaaagaagaaataactcagggaataaaaaataagaaagcccttgccgagcatttaatgtttggcaagggctttttttataagaatgttcccggaccgagaatgtcgtacatataactgacattgcgggtttttagcaacattccttgcggggaataaaagagctggtatttgatatctacattatcttgtcctaccttaatgacgatgattgcctgccatttaggaaactccaccatggttacatcatttactacccaactggcataaggaccggatacaaaggcattgtatacggtaggtgtcacccggtcgagactgacaaggtccgtctgtgtcatttgccattgagcctgcgtattgaaccagacgtttttagtgaatccattcataacaaagttagcgcaataatagccatcatcctgcgaccatgctataccgttggctttggggtacatctttttgaaggcagcctgtatattgccgggaggtaagattgcgaaggcagatacagacaataataatatgactgccaaaaaactaattttcttcataaggttctggtttaggaaattatttatctaactaaacagcctttgagaatttttgttttcagttggggagaataaatcagtagtatctccattggggctgcctaaaaagtcaatagtatcatcaattcccctcccttcgggaagctaccctttatacacaagtatatattattttttttatctttgcttgatgttattagagacagatcaaattcgtgatcctcggcttttgcggcgtttaaacttaatttgctctcagatggttgtccatcaaagtgctatagtgaatcaatttagtaaggaacataaagaaaagatgggtgcttatagatttttgaacaattcctcagtcagctctgatgctatcttatcaggtctgatacacacttgctgtaagaatgcttccggtcgtaagcatttactgtgtattcaagatacctcggagataaactatgaggctcatgttgagcgaatgaagaaaaaaacagccagtcccggcattgtcggtcaaaagcaatgtggtacttttttgcatcctgtcttggtagtggatgcctccagtcatattcctataggcttttcttcggttaagcagtggaatcgctcaccggctgctttaagtcgtgaagaacgtaattacagatatcagcctatagaagaaaaagagtcatatcgttggatagaaagtggaatggctgccagtgagcaaatgccccgggatgcagttaaaacgatcatcggtgaccgtgaagcggacattttcgagcttttcagccgtatccctactgataatgttcacttgctgatacgttctgttcatgaaaggaattgccggttggatgatccagactgttctgtccatctgaatacattaatggagcaggctgttctacgggcagagtatagctttgaagtgctcccgggaagcggacgtaagaaacgggtagcgtgcatggaacttcgctttgaaagagtcactttgtgcgctcctgttaacggtccggcaaagggcagtccccctgttagtctttattgcatacatgttaaagaaaaatcttccagtacaccggtaaatgagagccctattgaatggagactgctaactacacatgtggtggagactgtagaacaagcaattgaatgtatcggttggtatcgttgtagatggctgattgaagagttgttcagagtgctcaaaagaaagggattcatgattgaggacgcacagttggaaacagtttcggcattacaaaaactaatcttaatttccttgcaggcagccctgcaggtgatggtactcaaactttcttttgataaagaagatgaaaaactctcttcagaaatctactttacaagcaaagaaatagcattattacatatagtaggaaaaaagagtgagggaaatacaaaaatacagcaaaatccatataaaaaagaatcaatggcatgggcagcatggattattgcaaggttaggagcatggagtgcatacaagagccagtccattccaggatatataacctttaagaatggactggatagattttatacacagtttgaactgtatgagtttatcagataagacttgtgtataaagggtagcttcgggaaggaggagagttaagatactattgatttatcatttgccttcaatcggagcagatcagaatgtaatcttcagaatcttcccattataggctccaacggaaacctcagtggctttataaggcaataaacagatttcctctttggcaccggtcaataagtctgtagcctgatatttttccatttgtggtatctgtaagaaatcaaacgcgtgagaaggtacgttgattgctacatcaaccagttggctatcgaaattgacgatgatgaacagcaattcattcttatactttcgcataaaagtatattgcttatgttcgtcgaaacgccatccgtttttattggcgtacatcaggtcgaagaatactcctttggcgatggatgtctcttcattacatagcgtaagtactctttggtaaatgctgtacaggcgtttatgctcttcggtcagcattttgccgtcaaacttaccgccattgcgccagcgacgaatagtatccacgctccagtaatcgaatatcgtagtccgtccgtctcttccgctgaaaccttcgctgtccattcccagttctccaaactcctgaccaaaataaatcatcataggattggtgttcatacaagcagaaacgatcagagcagggattcctttacgtggatctcctgcaaagaaatcggaagcgatgcgctgttcgtcatggttttccaggaagttcagcatttgcttttctattccgttcagactttgccagcagtgggtgatggatgcagcggattcgtagccgcaagctacattgcggagtgtatcgtataaaccgaccttatcatatagatagtcaaatttcccacggaagagataattgcggtattcgttgggattatagacctcggcaatgaaaaggatttccggatgtgcttcctttacttgtggaatagcccattcccaaaattctacaggaaccatttccgccatatcgcagcggaaaccgtcgataccttttgaggcccagaataaaagaatgtccagcatctttatccaggtatccggagtcggggagaaatggcaagtgccgccattcagataatccactccatagttcagcttgatggtttcgtaccagtcgttgatgttcggtgtagcgtcaaaacggttgttacctgtcgctttggccggatattcatggtaaggctctgctgcgccttctttcatatcgaactgggcacgcaactcggactgcggtatatagtagaaattattgtacgggctgaaagcgtagttcgggtcatcgtttgctcccagttcggtagtgccgtccggttgtgcatccgagtgatactggcgtgctacatggttggggacaaaatctataataactttcagtccggaacggtgagtgcgatgtaccagattctcgaactccttcattcgttccggcacatcggttgccaagtccggatctacatcataataatccttgatggcgtagggagagcccgctttgcctttcacgatggcggggtggtcgggacgtatgttgaagcgacggtaatccgtctccgttgcatgctcgataatgcctgtataccagatatgggtagcacccagtttcctgatttctccaagtgccttgagggtgaagtcggccattttaccacatccgttggcggtaatgtctccattatagacacaatggttgttattgtttccgaacaggcgtgtaaacacctgatagataatcattttattttcgttgttcatatagagtagattttatttcatattataaatattttcgggaaaagtaaggagttacttccatattttccctttttccgccagtgtctggtcaagtaagtcattggctatcttataaccttgctcgaagatttcttctgctttttccagttcggtgttgctgtatccatagaggttgtatggctcgatcagcaagtcacatttttctctttcggggaaagtattggcacggaacataaagtggaaggagcgcatggcaatgcttacgatattcattttatagtcttgcgccatgatgggacttacgttgacggctaccaccttgtcgcatattctgcgaagggtggagaccggaaggttcatcattaatccgccatctacgtaattggttccgtcgatattgaccggagcaaacatgacaggcatacagcaggaagcagccacacgttcggctatggagccacggtggaaatgaaccatacgtccgtggtccagatcggtagccgtgatgattaaggggatttgcaactcttccagattcttggccttcagattggtatggagaaagtcaataaattcgcagagatcaaatagtcctttcttggggatgactaactttgtcaggtcttgaaacttatggccggagaagtattcaatcacttggtgaggttcatttccgtcggcataaaaaactccggcaagcgcaccggcacttactccggagataatgtccggtttgatatcatgctccagcagagcctgcatcacccccaaatgcgcaaatcctttaataaatcctccgcttaaagcatagcctatctgatatttacggctattccagttatttgtgaatacctccatgagttactttctttttttagttcgccacgaatttagtgaatttattgaaagtaggaggaatataatggatagtttttttgaattgtatacaatcctctgaaagctatccatatttggggctgatgctgctagaatccgaaatcgtctatctcaactttatgttcttctgattctttgaaaggtttcgcttctttctgcacagggtttccttcgatatatacggcacggaacgggcgggcagggcagacgtattcgcagccgccacatccgacgcagatctctgtattgacgtggggaagagtcagtccgtctttgtagggtaccatagcaatggcttgcgtaggacaatgctctgaacaggctccgcaactggttccgtcagtgaggacaatgcaattttcttctataaagacgacatagcccatctgagtgagatgtttctgttctaccgtcaacggagggatggcaccgttgggacagacatcgctgcatacggtacagtcgaaattacagaatcctttttcgaaactgaccgttggctgcatcacacctcccagaccgtattccatgaaagcgggtttcagtacatgcgacgggcatttgctgacacaaagatggcatgatgtacaatgttgctggaaacgcttctggctgacagatcccggaggagtaatcggattttcttttttgtatgcctttttgccttccatcgtcgcaatggattcttgcgcctttgtaagaagcgtgggagctgctccggcagtagccagtccggcaagcagaaaacgacgtttggaagaatctgcagcaacggaagatgattctgttgccaccggttgtttttctgtagcggaagaacgttgttgtccctttgaagcaggggcgtaaaccagcgctttctgtttgcaggcaccgagacagtcgaaacagtctacacagcggctatagtcaatagcgtgttctttgctgtggatgcaggcagctttgcatttggtagcgcaaagtccgcaaccattacattttgcggtatcgatacggactttgaacaaagagtaacggctcaaaaatcctaataccgtacctaccggacaaatggtattacaccacgtgcgtccatgtttccatgctaatataagaatggcggcaaaggtcagtatcgctataagaagggaagaaaggcttaataccgagatgtctacctgataaaacgtgtagttgtcgaatctggaaaatacggattccagcaggttgtttcccagcatatacaccggtttgaagatatgtactacaatgcgtccgtatgcgctatacgggtccagcaatcccaataccactgagaagccgcatacggaggcaattacagtcactccgagcacggtccatctcagcatattctttgcaggactgtaccgatatctttttttcttctttcccacagactttgaaatgcgtgctataacatcctgccatattcccatcggacagatggtagagcaatagatacgtccgaacaacagggttaacgcaatcagcacaatcagtatgcctatgctgagagatagcacggcagggacaaactgtatatgtgccaatcgatgaaaactgttcggcagaatattagcaaaatcgagaaaataaaaagtaatcagtgcaaaaaggacgactgatattccgatacgtatctttcttaacatggtggtttacatcttaattcgcttgacattcagtttgtcgatgtccatcgttcctactttcagtgcttctcctttggcaaggtgacctacggtgtccagcggcatttcgcgtatctgattgaagaatttggctgcggctgtatctacggctacaatatccggtgaaataaagagaccttttgccagcaccacgtccgaagcggaacgacctcgcggtccgttggtcttcatgatacggtaggcgtctacgacgttaagcactgctttcttttccagtgtgcagatgtccgcaatgcattgctgcaagtcattctggtggaaaaagccgcggtcccagacgatacccatatggtttttcatggagatagtcaggttggcgcctccgtgattcttcaggatagggacgttaatccatacatcacaattcaggatggcttcatgtattttcgccttcttcatcttttgtccctttggcagatcaacgggtttgtagtaagattccaggtgggccggcataactttggctccggcttctttcgcggccgcttcgataccgctgtttttgtagcacttctgccaatcgtcgcaggtatggtcgaatacggtgacctctttggctccggcggcaaaacattgtttgatgatttccgtgatcagtttcggattcgtgtttcctgccagttcgggtactttatcccatccgatattgggctttaccactactttctgtccgggtttgatgaattgcttcataccgcccagctcgctgatagcacgacggaacatggcttccggttcaccgcccatgacggccaccaggtccggtttgtcaccatttgctttattgattgtctgagtcagtatttccatcgcctctgaacgctgtatagtcatggcggcaccagtaatagctactgtcttaaaaaaatcccttctgtccatctttcttttttagtttagagttttgcaattgcctttagcagggcgtatccgccaaaccattgaatgagcatacccggaatgccgatacggaagtcttgtactgcgatatagaaatctctctcgatcatccattcaaaagcggttcctatgagttgataggagagaattactccaaggacggctaacaaagaaacggttttcacggtacgcgcagcaagggcggaagcaccggcaagcaaggttgattttatcagtataatcgggagaacggcttcggatggcatggcaaacaagacatgattgatgacaggagaaagaacagctgtcagcaatcctacccgaaagccgtatttataagcggcaattaaggtaaaaaagtaaattggtaataaagtcggtccaccgtaaggaacgaggtggcacagttgtggaagtgcgatgttgcctgctacgaataacagggcgaacaggtaagttttcacattgctgtaattcagcgaatagagtttggcggatgtttccattttcattgatgactttaatgtttagattgatgatatcttaaagattagactattctcgtttgaaaaagtttaatcggtctcataatttcttggccggtcaaatcatgattgggctttgatgtttacaaaagtagtacaaattttcaatgaaacgtattattttatcgctttttgtttattcattgaagtgcgtgaaccggaacagtggatttctccttccggtgacaatgaaaaaaatgtatgatttatgaatcatcggtgtttgtgtttataataaactttgtgatagttttagtaaaacggtatctgagtttattataaacgatgtaatcccgtttatggctttctgtgctgaaatttggcaacaaaaaaggctgcgatttccattggaagtcgcagccttcagcttgtatactgatgactcatatcttatttgttatagggaaatagatatgtcttgttgtaatattgtactttccttacggactgatcaatcttgactgtatgttaccgttcatgtgatacattacagcaggtatgttgaaagacagacttcttttcattggttacggttttataggtttattattgttctgcttacaaatatacaacattaaaagggctttgtcaagtcctgacagaaataacccgttaaactctgagaaagtatcctgtttagaaattaatatcggatacgtttttcttgcattcttcaagtctttccagcgcctccttggataactgtggataatgtaagtccagtttttccatgcgttcacagataatttgcccgacggcatatcgcatgaaccatttgttgtctgccggaatcacataccacggggcaatctctgttgaagtttctgtcagtacatccgagtaggctttcatgtagtcgtcccagtattgccgttccttgacgtcggcagaagagaatttccagttctttgattcatcgttcagcctctccatgaatcgtttcttttgttcggcttttgaaacgttcaggaagaatttgatgatgaccgtcccgttttcagtcagataacgttcgaaatcattaatctgccggtagcggcgtttccaaaattcgttgtctatatctttcgcttttagtattccgggtagcttgttggataacaggatttcgggatgcactttggctatcagtacatcttcatattgggaacggttgaagattccgattcgtccccgttcggggagcgaacgattaattctccataagtagtcatgatccagttcttcggcagaaggttgcttaaaggagtacacctgacacccttgcggattgatgccggacattacatgcttgatcgttccgtcttttccggcagcatccattgcctgaaaaataaccagaaccgagtagcggtcttgtgcataaagcatactttgcagttctgacagcttttcgatattttgggctaactgttctttggcatcctgtttggacatatcagcagtaaatgagggattgaaatcggatacatgatgttccttccccggtttggctgtaagctcttttaagacttcttttttcattgttgtataattaggttgttataggtatataacagttgaataaagaaatcagttcttgccaaattaagagcgttgaatagtaattccccaattatgtatcaacagattctacataattccacactaattccacaattatatttatattgtctgctgtttatatgtttgattatcagttatatatggcggagtgaaacgtttggcatctgctttgctatatattaagtacaagaaacaatagttctattattcacacttaaaaaattacgattatgaaaaaggtattagtagcagtagcattggtattgggattaggtagttctgtagcattcgcacaggaagtaagtaacactccggcagtggaaactcagacacaagctccacaggatgagtatacaaagattgaagtgaaagatttgccggaagcagtgacacaggcaataacgaaaagctatgaagatgctaccatcaaggaagcgtatgttgccgaaaaagaaaccggtaaggtttataaagtaattatcactacaaaagacgcccaggaagtaaccgtacttctgaatgaaaaaggagaagaagttaaagagataaagtaaaacttcgaaagtaataactcatagagaggttccggttcgtgatgaattgggacctctcgttcgatgtattaggttctgtataaagatagtcggcagtaatatatacggtaacaaagcaaggaggcttacgacttatttttaagtaattcataataatgtgcatcaatgaactggccatttttgaagcaagccttacgatgtattcctgctttctgaaatcctgctttctctagcacacgcatggatgcggcattgtgttcatataccgtagcatataggcgtattacatctgtatgctgaaaataatgttctatagctctttctaaagcagctgttgcaaggcccttgttccagtatgtttccgaaatccagtaaccgacttctgcattgaagcgttcgacatccgtcccgcggacgaatccgatattaccgattgcctcatgattcgcctcgatgcaatattcattctgttccacttgttccgaagcgtatttaatgaaggcatcagcatctgtttctgtatatggaaaaggcagcccgtcacgacagttatcccatatcttcttattattcagatgccttgctaaggctttggcatcagatactttccatggacgaagtataaaatccatattcttattctttgtagctattatggtttctttcccgaatctttccccatgcgtgtgtgtcaaacaggcaactgctgcgcatagtctcatacatcaccttaaatctcgacatcggaatggtataactcagtatatcagcctcaaaataagggcgtacagatggatcaaagaagccgatgaatgttctgtatccgcctttacgattctccagaatcgtctgtgtgaccacagaactgcatcccgacccgaaagtggaaatcactgtatcctccttattattatcgaagaaagcccaggtggtcagtccggataatatatcgggattggccaaaaaaaggattccttccaaatgatcgaacgtttccactttatctatacgggcaaaatgcagatattccttttctgcccttggtactcctagttgctcaataaagctttttaccatttccggcgtctgcttatatcgttcctttagagatacgaacgtcggcacgtgctcgggcatatcggtgaatccggtataaaacttaccaccgccgcaaccaattgtttccgcattcagactgatggtattacctcccctgactttactcatgcttttaaagaagcatccgttcactttcccggtttcattttcaagaatgtccgagtaccagaatacgataggcaattcagcatattcgccaaaagcttcccgatagttttcgatgaatttttttatttccataattaggtattttatctacgtacaaagttaaaataaaaaagtaaggagcaaagaataaagtccgaaaatatacgtttggtatacggagcgatggagcactgagggacgctatcagatcaaagtttctatgatggaactatcggcaggaatgaatctgaataaatatctgaagctaagtctgatagcagagatgggaggattatcgtgcagccggattgcttattacacaacacgtacactgaaggcctttttcgaagatatgtccagagatacggacccttatttcaaaccggctgtatatgtttcgatgggaatgaagtataagttctgaaaaagtagtaactttatcgccatgtcagtgaaacgaacattatattcagcattaaaagtcataggggtatttctgatcatatccttgatattcaggtgcccggtatcaccgggatagagtttgcgcaaagcattcaatatggcttctgactttattacagactctcactggaacacccatacgttaagttttggtcttatttcataaaaaagggtattttgcaaaagaaaaaggagagaacatagtgcattattcccgcgaaatgccgttatttgcactcactaaacaataaaaggtttatttcgatttgattatttcacatgaatcttctcatttattgagcatatccatctctgattaagaacttccaaagaactttgttattgaaattattaattttttatatttgtattttatgaatttgtacattggaaatcttaactataacgttaaggaatcagacttgagaaacgtaatggaagagtatggagcagttgcttcagttaaattaatcacagatcgtgaaacaagaagatcaaaaggctttgcttttattgaaatgccggatgatacagaagcagctaacgctatcaaagaattgaatggtgctgaatatgtaggccgtccgatggtagttaaagaggctttgccgaagaactaattgactgaataacaatcagtatataaaaagaaggtgtgttggtgatcccaacacaccttctttcgtttctgcagaatcctggccggactatttcttaaagtccaaagaatttatctctctttttattgtctgcggttatttttttcttacctttggttcactaacaacaaaccgatagaagatgaatcaagaacttttaatgaatcctaactgtctggtggctgctttggaaaagcctgccgccgagtttactaaggcagatattatttcttttattcagaagaataatatccgtatggtcaatttcatgtatcctgctgctgacgggcgactgaaaacattgaattttgtaattaataatgcggcttatctggatgcgatccttacttgtggagagcgggtggacggttccagcctgtttccttttatagaggcggggagtagcgacctgtatgtagtgcctcgtttccgtaccgcttttgtcgatccgtttgcagaaataccgacactttcgatgctttgttctttcttcaataaagacggtgagccattggaaagttctccggaacatactttgcataaagcgtgtaaagcatttactgatgtcacaggtatggagtttcaggcgatgggtgagctggaatactatgttatttcaccggatacaggaatgtttcaggctacagatcaacgcggttatcatgaatctgctccgtatgctaagtttaacgatttccgtacgcagtgtatgtcatatatagctcagacgggtgggcagataaaatatggtcattccgaggttgggaattttacattggatggcatgatttatgaacagaacgaaatagagttcctgcctgttcatgccgaagatgcggcagatcaattgatgattgccaaatgggtgattcgtaacttgggatacagatatgggtataatgtgacattcgcgcctaagattacggctggaaaagccgggtcaggtctacatgttcacatgcgtattgtaaaggacggacaaaatcagatgctgaaagacggtgtattgtcggaaacagcccgtaaggcaatcgccggaatgatggaacttgctccttctattacagccttcggaaataccaatcctacttcttacttccgtttggttcctcatcaggaagcaccgaccaatgtttgctggggagatcgcaaccgttctgtattggtgcgtgtaccgttgggctgggctgccaagaccgatatgtgtactttggcaaatccattggaaagcgaaagtcattttgataccagccagaaacaaacggtagaaatgcgttctccggatggttcggcagatttgtatcagctgcttgcgggactggctgttgcctgccgtcatggttttgagatagaacaggcattggacattgcaaagagaacgtatgtaaatgtaaatatccatcagaaagagaatgaggacaagctgaaagcattggctcaattgccggatagttgtgcggcatctgccgaatgtttgcaaaaacaacgtgctgtcttcgagcaatataatgtatttagtccggctatgattgacggtattatacgcaagctccgtagttatgaggacaaaacattacgtgccgacatggaaggcaaaccggaagaaatgctggaactggtacataagtatttccactgtggataagcaataaaagcattctgcttataaaaatactacaactaaaagagggtgcacttcacaatgaagtgcaccctcttttagttaatcttcattattatcttcttcatcatctaccaggttattgagttcaagttccaagtctaccaagtcttgttcccataactttatgatatctttcggtgtatctttggctgccttcttaattctttcctgagcaacagatacttcatgctctaattgactacgtctgctcatacaattcaatatttaattaataaaattataaacaaacagtaaggagaatagttcgatgggatgaatttaaaaatggacgggatgaactatttataaataagggctgttgtagtctaaaatctttttaaatatacaattatgctcaatttattagccgtgtttttagtctgttcaggtatcggaattgcagttcacatagcaatcgatctgacacatcgtccacaatcaatgaagataatgaatgcagtatggatattgactgcattgtggggaagttacttagctttatgggcttataataagttcggacaaggtgctcccatgaagatgggaggtggtgaaatgaaaatggatatgtccggtatgaaagacatgaatatggatatgtcgatgggagatatgtccatgaaacatcctcattggcagtctgtggctttatcggctttacattgtggagcaggctgcacattggctgatataataggagagtggttcactaattatatcccggtaaccgttgcaggaagtcagcttataggaaactgggtacttgattttatattggcgttaatcatcggagtttattttcaattctatgctattcgggagatggagaggatatcggtgggaaaggtactgtcccgtgcttttaaagcagatttcttttctctgttgtcttggcaaatcggaatgtatggctggatggcaatcgtttattttgttttatttgtcaatgagcctttgcctaaagacacatggatattttggtttatgatgcagctggctatgctttttggctttttctgtgcttatccgatgaatgctttattaataaagttaggcgtgaaaaagggaatgtaaatttcagatattactttatcatcgcggggatatattggtacataaaatagaaccacacggagaaacaaaagcccaaagctctatttctccgtgtggttctgtttatcttttcagtaacttaggaatatccgaaggctcttgtgcaactcgtatgccggcagcttctaaagcctctattttgtcttttgccgagccggaacctcccgagataatggctcctgcgtggcccatctgttttcccggaggagcagactgtccggcaataaatgctactacaggcttatttacatgactgcgaatatattcagcagcctgttcttccgcgtttcctccgatttctccgattaacacaattgctttcgtttcaggatcattctggaacatttccagtagtttaaggaaatgcagacctaccacaggatctcctccgatgccgattgcagtagactgtcccataccattagtcgttaagtgatatactatttcataagtgagtgttccactacggctgatgacaccgacatttcctttctgaaagacttgtcccggaaggattcctaccatactttctccgggagaaataagtcccggacagttggggccaaccaacattgcccctctttgttcggcaaaccgatgtgctttgatgacatccagggtcggaataccttctgcgatacagactattagccggatgcctgcatccgcagcttccataatggtatctgctgcaaaacgggccggcacaaagatgatggaagtattagcctgtgtctgttttacagcttcatgcatcgtattgaataccggaataccgtctacttccgtacctcccttgcccggagaagtgccgccaacgacattcgttccatattctttcatcttcttggcatgaaaaagcccgtctctaccggtaataccttgtacaatcaaacgggtggatttatctattaatatactcattgttccttcattttttatgtgatttcatcttaagatttgatagccattaaagcggcttcctgcatagttgtagctatctgaaaacggctatggttgcgtaaaagatcacgtccgagatgctcattggttcctgtgagccggacaatgacaggtatatcactcttaatctgatcgaatgcctgaataagaccgatggctacatcgtcacaacgggtgattcctccgaaaatgtttatcaggacgacctttactttctcgtcctgtaagagaagtttcatagcttcaaccaccttgacagggttcgaactaccgccaatatcaaggaagttggcaggatttcccccatgaagttttatcatatccattgttgccatagcaagtccggcgccatttaccatacagcctatatttccatccatgtgaacgtagctgaatcctttgtttttagcatccgcttctactttttcttcttctgtaggatcaaacaaactcagtacatccggatggcggtaaagagcattatcgtcaaaaacaattttggcgtcaatagccatcaatatgcctttggcggtaagagccaatggatttacttcaaccagcgatgcgtcattctccatgaaaattttgtagagtgcttgcagaatagcggccattctgccggcttgttctatgtgagggaagagcgagaatgcgaaacggcgtgccagataatcaggcagaccgatgaatgggtcaatagcatagcgaatgattttttccggtgattgccgggctacttcttcgatatccataccaccggacgcactcatcataaggatgaccgagcgtgtgtttctgtcaatggtgaagctgacatagtattctgcggcaatatcaaccgcctcgctgaccagtatctgattgacaggaagccctttaatactcatacccagaatgtttttagcttcctgataggtatcttctgtattatctaccagtttaacacctccggcttttccccgtccgccggtcagcacttgtgctttaataaccactctgtccgagcccattctcttgtatgcggcaactgcgccggcagccgttcgacatagggtatgcctttcaacagggatcccatacttggagaaaatttcttttgcttgatattcatgtattttcatggtccgcgaatttgaataaatgattcctataatgaaaacaagtgaaagattcggaatgtttgctcgtagagaagactaatggtgtgttttacagcatattaattgtctcatgtttgactaataagcataaaaaaagcgtatcggcaaactagtcgacacgctctatagttgagaaaaggtaaagtatatctacgaatgcttatgcaatgccgtgagcgcttactgtaccatctattttcttgatcaatccctgcaatactgcacccggtccgcattctgtaaaatcagtagcaccatcggcaaccatattcttaacagactgagtccaacgtacggaagcagtcagctgggcaaccagattctttttgatttctgcgggatcagtatgaggaagtgcatccacattctgatataccggacatttgggagtatggatttctgttgcgttgatagcagcttccagctcaactttagccgggtccatcaacggagagtggaaagcaccacctacttttaatgggagagcacgttttgcaccggcagctttcatcagttcgcaggctttttcgatgcctggtacagaaccggagattacgatttgtcccgggcagttatagttggcaggtacgcaaacttcaccttctgcattaacagatgcacagatttcttctaccttttcatccggcaatgcaatgatagcggccatcgtagaaggagttgcttcgcaagctttttgcatagccattgcacgagcataaaccagtttcaatccgtcttcaaagctcagggcaccggcagccaccaatgcagagaactcaccgagtgagtgtccggctgtcatttccggtttgaaatcatcgcccatacaaagagcagagataacagagtgaaggaatacggcaggttgagtaacctttgtctgacgaaggtcttcgtctgtaccattgaacatgatatctgtaatgcgatatccgaggatatcatttgctttttcaaacaattcttttgctaaagctgagttttcatacaggtctttacccattcctacgaactgagcaccttgaccgggaaatacaaatgctttcatatctttattatttaattgatttttaaatgcgggtgcaaagttacagatttttatgatacgaccgcacaaaatgtacacatttgtgcaatggagtcgggaaaatgccacagaggtccgttgccatggcctatattcaagtccttgcctgcaatgatggcatgagtaatgtattctttagcgtgacggatggattctttcatcgaatatccttttgccagatagcttgcaatagcggaggagagggtacacccggtcccatgcaggtttttactttctatctttttctcttcatatatataataggtgtgatccggagaatataagaggtcgcacatttgatcgccttccagatgtccgcctttgatcaggatatggatctgataactgtcggagagttgtttggcagcttccagcatatcctgtgtattttggatgctcttgcctgtcagcacctttgcttcatcgatattgggggtgactaatgtgacaagcggcaaaagttctttcttaatctcttcgatggcttcatttgtcatcagcttccggccgctggtagataccatcaccgggtcataaatgatgtgctccggtgaatatttccgtatacagtcggcaatgacatgaacgatctgaatatcgttaaccatgcctatttttatagcgacaggctgcaagtcctccatcaccgcttcgatttgtccgcaaacaatttcgggtggtattgcatggacggcgcgtacccctagagtgttttgcacagtgacggcggtgatagcagatgccgcatagcctcctaatgccgagattgttttgatatctgcctgaatgcccgctcctcccgaacaatcggaaccggcaatggataaaatgacgggatgacgttccattttagattttttaatatttatccggcaaagatagaataaaaacggcaagatacaaaatgggatatcgtttgaaatacaataagtccgttgccggagaagacaaagggtgaatatgaaaagtgctgataataaagagtcattccgctttttgtactttatacaattactcgttgccggaacgggtaaaatacatattgtaattcagaagataacactaagtactcatattgtagattgtatgatatgtatatctatgaaaaacaatgttttatagcatgtcatttgttattgttcgaatcataaagcgcccctatatttgcatcgtattaaagaaaaggatatgcaaagtatacagaaaaaagcacccttggcaaacaatcacatatcagtagactgtgtagtgattggttttgacggagaacaactcaaagtgttacttgtaaaacgtgcgggcgaagataatggtgaagtgtatcacgatatgaaacttcccggtagccttatctatatggatgaagatttggatgaagcagcacaacgtgtactgtatgaattgacggggctcagaaatgtaaacctgatgcaattcaaggcattcggctctaaaaacagaaccagcaatccaaaggatgtacgctggctggaacgggctatgcagtcaaaagttgaacgtatcgtgacaattgcttatctgtcgatggtgaaaatagaccgggcactggacaagaatctggatgatcatcaggcctgttggattgctttgaaagatgtaatgacattggctttcgaccataatctgattattaaagaggcaatgacctatatccgtcagtttgtggagttcaatccttctatgctgtttgagttgcttccacgtaaatttaccgctgcccagttgaggactctttttgagttggtatatgacaagcctgtggatgtgcgcaacttccataagaaaatagcgatgatggaatatgtagttcctttggaagaaaaacagcagggagtagcccatcgtgcagcgcgttattataaatttgataagaagatatataataaggtgagacggtagtaggtaataagtcataggtaataagtaataggtaataagtgaacaggctgtttgcttaaatatataattcaaaattttaaaaatcatcatgtttctattaggttatgatataggtagctcgtccgttaaagcgagtctggtcaatgctgaaacaggtaaatgtgtatcgtcagcgtttttcccgaaaacagaagcgaagattatcgcagttaatcccggatgggcagaacaagatcctgagagttggtgggaaaacctgaagttgtccactcaagctattatggcggagtcaggagtgagtgctgctgagattaaagctatcggtatttcctatcaaatgcacggactggtatgtgtagataagaatcagcaagtattgcgtcctgccattatctggtgtgattctcgtgcggtgccttttgggcagcaagcatttgaaacaatcggagaggagagatgcctttctcatttgctgaattcgcccggtaactttacagcgtctaaactggcttggatcaaacaaaatgaaccggctgtctatgagcagatatataagatcatgcttccgggggattatattgccatgaagttaagcggagatatctgcacgactgtttccggtctttcggaaggaatgttctgggacttcaaaaataatcgtgtagccgatttcctgatggattactatggcttcgactcttcacttattgcggatatcaaaccgacttttgcagaacaagggcgtgtgaatgcagttgctgcgaatgaactgggattgaaggaaggaacaccgattacttaccgtgccggtgaccagccgaacaatgcgctttctttgaatgtgttcaatccgggtgaaatcgcttctacggcaggaacatcgggagttgtctatggggtgaatggtgaagtgaattatgaccctcaatcccgtgtcaacacctttgcgcacgtgaatcatacgatggaacagacgcgtctgggagtgttactttgcatcaacggaacagggattctcaattcatgggtaaaaagaaatatagctcccgaaggtatctcgtacaatgaaatgaatgtgttggcttccaaggcgccgatcgggagcgcaggtatcagcatcctgccttttggtaatggtgcggaacgtatgctgaataataaggagataggttgcagcattcggggggtagacttcaatgcacatggcaaacatcatattattcgtgctgcacaggaaggaattgtattttcttttaaatacggtatcgacattatggaacaaatgggaattccggtcaaaaagattcatgccggccatgcaaatatgttccttagctccatcttccgtgatacattggcaggagtgaccggagccactatcgaactttatgatacggacggttctgtaggagcagcgaagggcgcgggtatcggtgcaggcatttataaagataacaatgaggcatttgcaactcttgataaactggatgttatcgaaccgaatatagctaaacgtcaggaatacgccgacgcatacgccagatggaaatataatataaataacgatataataactttttaaataacaagaattatggcaacaaaagaattttttccgggaattgaaaagattaaatttgaaggtaaagatagtaagaacccgatggcattccgttattacgatgcagagaaggtgattaatggtaaaaagatgaaggattggctgagattcgctatggcatggtggcacacattgtgcgctgaaggtggtgatcagttcggtggcggaacaaagcaattcccatggaatggtaatgcagatgctatacaggcagcaaaagataagatggatgcaggatttgaattcatgcagaagatgggtatcgaatactattgcttccatgacgtagacttggtttcggaaggtgccagtgtagaagaatacgaagctaacctgaaagaaatcgtagcttatgcaaaacagaaacaggcagaaaccggtatcaaactactgtggggtactgctaatgtattcggtcacgcccgctatatgaacggtgcagctaccaatcctgacttcgatgtagtagctcgtgctgctgttcagatcaaaaatgcgattgatgcaacgattgaacttggcggagagaattatgtgttttggggtggtcgtgaaggctatatgtctcttctgaacacagatcagaaacgtgaaaaagaacaccttgcacagatgttgacgattgctcgtgactatgcccgtgcccgtggtttcaaaggtactttcctgatcgaaccgaaaccgatggaaccgactaaacatcaatatgacgtagatacggaaactgtaatcggcttcctgaaagctcatggtctggataaggatttcaaagtaaatatcgaggtgaatcacgcaactttggcaggtcacactttcgagcatgaattggctgtagctgtagacaatggtatgttgggctcaattgacgccaatcgtggtgactatcagaatggctgggatacagaccaattcccgatcgacaattatgaactgactcaggctatgatgcagattatccgtaatggtggtctcggtaccggtggtacgaactttgatgctaaaacccgtcgtaattctactgatctggaagatatctttattgctcacatcgcaggtatggacgctatggcccgtgcactcgaaagtgcagcggctctgctcgacgaatctccctataagaagatgctggctgaccgttatgcttcatttgatgggggcaaaggtaaagaatttgaagacggcaagctgactctggaggatgtggttgcttatgcaaaaacaaaaggcgaaccgaaacagactagcggcaagcaagaactttatgaggcaattctgaatatgtattgctaattaatatttaaaacaggcggtaaagcagcggtagggctgctgctttatcgcctgactttttctaatccaactactacactactttatccactttttaaaactatgaataatacaacgaacgaaggaagtaaactctacttgtattcgattacttctgttgctattttgggcggtttgctcttcggttatgatacggcggttatatccggcgcggaaaaagggctcgaagccttcttcctgtccgcttccgattttcagtatgataaggtaatgcatggcattacttcttccagcgcattgataggctgcgtgctggggggggctttatccggtgtctttgcttcccgtttgggacgtcgtaactcattgcggcttgctgctgtattatttttcctctcggctcttggctcttattatccggaagttcttttcttcgaatacggaaaaccgaatatggatttgttgatagcattcaatctgtatcgtgttctgggaggtatcggagtaggactggcttcagcggtatgtccgatgtatattgctgaaattgctccttccaatattcgtggaacccttgtttcgtgcaatcagtttgccattatctttggtatgttggttgtgtactttgtgaactatctgattatgggtgaccatcagaatccgattattctgaaagatgctgccggtgtgttgtcagtaagtgctgagtcggatatgtggacagttcaggaaggatggcgttatatgtttggttcggaagccttcccggccgctttcttcggcctgttgctgttctttgttccaaagactccccgttatttggttcttgtacagcaggaagaaaaggcttacactattctggagaaaatcaacggtaagaagaaagctcaggaaattcttaatgatattaaggctactgctcaggaaaaaacagagaaactctttacttatggagtaacagtgattgtgatcggtattctactgtccgtattccagcaggcgatcggtattaatgcagtactttactatgctccgcgtattttcgaaaatgcaggtgccgaaggtggtggtatgatgcagacagtgattatgggtattgtaaacattatctttacgctggttgctatctttacggtagaccgctttggtcgtaaaccattgctgattatcggatctattggtatggctgtaggagcatttgcagtggcaatgtgtgatagtatggcaatcaaaggtgttcttccggtactttctatcatcgtatacgctgctttcttcatgatgtcatggggaccgatttgctgggtattgatttcagaaatcttcccgaatactattcgtggtaaagcagttgctattgcagtggctttccaatggatattcaactacatcgtatcttctactttcccggcattgtatgacttcagtccgatgtttgcatatagcttatacggaatcatctgtgtcgctgccgctatctttgtttggcgttgggtacccgagactaaagggaagacgctggaagatatgagtaagctttggaagaaaaacaaataaattaggttagtgtttttttatcatgtcattgtgacgtgagattattcagattatgacatcatgcaaattgtatggtgtcataatcatatatggatattataatctgtgaatcagtggtttattttgcattatctatttctggatactccgaaccatcccggcacaggaaaataaaaaggagaacggatatagcccggatgagtcagctttccttcatccacccgcttttgtaatctgcggagtgcagtggcttttcgaagtccacataatgaacaaagctgctgtgtggtaatacaagagttatctttgaaaaattcagctaatctcccatctatttctatatcgctcaattcctgtgacctgcgggtctcactgaccttttcaaaagttgtagcctttaattcgcgaagcaaatctttttccggagtaaaaacgattccactgcaatgaatattttcggcacggatttctttgggagaacgtacttcgggtgattccgctttgatacggaatgaaccgactcccggaatgtgaatactattcccgttggataattcttgtttgaaaacattggcaaactctataaaagaccctattacgtcgctttgtcttaaactacttctggactcaatcgtttcggctatatcttccagtgtgatggtgtcccgtacaaccagtcgggcatgatatctcgttttattggaatctttaggttggggagtcaggaagaaatcataaagtgcattcattgctttagttgttttgtgcgtatcaattagcagacttacgcagtcattttatttatttcgtgcctttctattgattggctcacattatgtgcaacagctaactcacatattgtgtaataactgtcgctcattatgtgcgacagctatcgcacgactggtgctacgcctaatatgatgcgtcaaaattactaataattctaatcaaaaacaacacttcaaaggcttatttctgttagatcatttttcaaaaaagaatgagtcagcttatttgcaaatccggtattcggtagtctatttttgtgtctcaaacctcacaataattttaaaaaacagcaagtatgaaaacaataattagagaaatggtagagacaataaaacaattgtttgcgcagaaacagcaaatgcaggagccggtagttgccaattacgaggtatccgaaatcgtggaacaaaagacactgaagaagaaggaagagtctgagaagacaggtgaaaaaacgggtaaatctaataaatggagtcaatcgttgactttgcaattaaaagagtatttgaatgacaattttgatttccgttataacaatttgacaggagctacggaatatagggagaagagtggaaagaactgtttccgacctattgatgaacgcgaaatgaatggaatgattgtggatgcccgcctggaaggaataccttgctggagaggggatgtacccaccatggttctttcaaacaaagtggagtcttataatcctttccatctttatgtaaaggaattgccgggttgggatggagtagatcgtgtgacccctttattgctacgtgtttcagataatgagatatggctaagaggaggacgttgctggttacgggctatgctttcacagtggagtggggaagaacgtctgcacgccaatgtacttactcctgtattgataagcgggaagcagggattgagtaaaagtactttttgccgattgctgatgcccgactcattacggcattattttattgataatctgaatctggcagcaggcagttcgccggagaagaagctcgtgaaaaacggattgattaatttagacgaatttgataagattaaagagagtcaacaggctacattaaagaatcttcttcaaatggtgaatgttcccgtttttcgtggcaagcgactgggatgggtgaatgagtcccgtcttgcttcttttatagccacaacaaatgtctatcaggtattgattgactccacaggaagtcgtcgttttctgtgtgtggaggtgttaaaacctatttcggaagaacctttggagcataagcaaatatatgcgcagctgaaagaagagctgaaatccggcgcaccggattatttaaacaaagaagaagaaaaggctttgcagaaacataacaaggcatattatcgccaatccttactagaagatgtgtttcattgttgtttccgtcatcctttggaaacggaaaaaggtatctggctgacaacagctgaaatatttcaagtgatgcgtaaattcaactctgcagctttgaaagaagtctctgcacgtcaattgggtctgaaactttcagccatgggatatatggcaaagcatacgtctttcggaaatcggtattatgtgtttaatctttcggctgagaaaaaagatgcgtcattataatacgttattatacaggtggttattgtaaaaagtgatttgctgatatatacattttatgcttactccttgaaaaaatacctaattaattttgcggattaaaatattgttcgtagttttgcgaacaataaataaggaggagatattgaagtgaaagaaaagcagtatacagtagagcaggagcagatagctcgttttgctaaagctatgggacacccggcacgaatggctattcttagtttcttggctaaacaggaaagttgtttcttcggagatattcacgaagaattgcctattgccaaagcaaccgtttcacagcacttgaaagagctgaaagatgcaggattaattcagggagaaatagaaacgcccaaggtgcgatattgtattaataaggaaaattgggaacttgcccgcaaattatttgctgcatttttgggagattgtaaatgtacaggaacatcgtgctgtggataacagcacttttttttaagaatattgttcgtagttctacgaattacgattaagagataaactttaatatagaataaaaaatggaaatcaaagtattgggaaccgggtgtgcaggctgtagagcattgtatgaaacaactaaacaagcaatttctgaattgggttgcgatgtcgtattaattaaagaggaagatttattaaaaatcatggagtataatgttttaagtcttccggctttagtcattgacggaaaagtcgtatctgccggaaaaagattatcacttgcagaagtgaaagaattgataacccaataataagatagttatgaagaaattcttttatttactattctcaaccattatcttaatatcctgtggtaatggtgcaaaagcaaaaacagaggcacagagtacggaagaaaagctgcctgaccatattgaggtactttatttccatggagcgcagcgttgtatcacctgtcgggcaatagaaactaatacagtagcccttttggatagcctttattccaaagagcaggcagacgataggattatctataaggttatagatatttcaaaaaaggaaaacgggcaaattgcggacaagtacgaagttacttggtcgtccctgtttgtgaatggttggaaagatggaaaagaaaatgtaaacaacatgacagagttcagtttttccaatgcaagaaaatcaccggacaaatttaaagagggaattaaaaataaagttgatgaattgctaaaacagttgtaggatggattttcttcaatcactattagacaatagttctgtccctgttataacagcctttatcttaggaattttaacggcaatcagtccgtgccctttggctactaatataacggcaataggttttattggtaaggatatagaaaaccgtcaccgtatattcataaatgggttactttatacatttggcaggatagtgacttatacagtacttggggttattcttattccggttcttcgtgagggggcaagtatgtatatggttcaaaaggtggtaagtaaatacggtgagatgttgattgctccggtattaattatcatagggatattcatgctcgatattataaagctaaatatacccaaaatcaatattggcggagaggggctaaagaagaatacaaaaggtagttggggcgctttgttattgggtattttgtttgctctagccttttgccccaccagtggagttttctatttcggtatacttatgcctttggcggcagcagaaacgggcgggtattttttacccgtaatatatgctatcgctacagggttgcctgtaatccttgttgcttggatattggcgtatagtgtagccggattaggtcggttttataacagcgtacaaatttttgaaaaatggtttcgcaaaattgttgctatactctttatagtcataggaatctattatgcggtcgttttttatctatgaacaatttaaattaatttaaataaaggacagtatgaaaaagatagaaatttttgatccggcaatgtgttgccctacgggtttgtgtggaacaaatatcaatcctgaattgatgagggttgcagttgttgtcgaaacattgaaaagacagggtgttattgttacccgtcacaatttacgggatgaaccacaggtgtatgtgagcaataaaacagtaaatgaatatcttcaaaagaatggtgcagaagctttacctattactttagtagatggtgaaattgcagtttctaaagtttatcctaccactaaacaaatgagtgaatggacgggagtgaatttagatttaatgcccgctaaataaatgtataacagatttatattaaaaaagaaatgaaagcattcaatttatccgatatagaactgactaaatacctgttttttacaggtaaaggtggagtaggaaagacttctattgcttgtgccacagcagttggtttggctgataagggaaagaaaatacttcttatcagtacagatccggcttctaacttacaagatgttttcgatcaatccttaaacggacacggtacagctatttcagaagtgccgggactgactgttgtaaaccttgatcctgagcaggcagcagcagaatacagagaaagtgttattgcacctttcaggggaaaattacccgaaagcgttattcagaatatggaagaacagctttcaggttcctgcacagtagaaatcgcagcttttaatgagttctcggactttattaccgatgctgataaagcaaaggagtatgaccatataatttttgatacagcacctaccggacatacattgcgaatgttgcagcttccatctgcatggagtacatttattagtgaaagtacacatggtgcatcctgtttagggcagttatcaggcttggaggaacggaaaggaatttataaacaggcggtagaaaccctatctaatacaagcgcaactcggttagtactggtcagtcgtcctgaaatttctccattgaaagaagctgcccgctcttcatctgaattacagctattgggaattaaaaatcagttgttggtgataaatggtattttacagcaactgaatgaagcggatgatgtgtcacgacaactgcataacaggcagcaaaaggcattacagggtatgcctgctgaactatctgaatatcctatgtacagcgttcctctacgttcttataatttatctgatatagctaatatacgccgtatgttatacagcgacagccttgcggatgatatttgttatcagcctgtaagtggtgctaaaagtatagacgacttggttaatgacctctatacttccggtaagcgggtagtgttcacaatgggaaaaggcggtgtaggtaaaactaccttagcaacagaaatagctctgaaattaacaaaactcggtgcaaaggtacatcttaccaccactgatccggcaaaccatctgaactatgatctcgctataaagtcgggtattacagtaagtcatattgatgaagcggaagtattggaaaactacaagaatgaagttcgtagcaaagcggcagaaaccatgactgccgaagatatggaatatattgaagaagatttacgttcgccatgcacacaagaaatcgcagttttcaaggcatttgccgaaattgtagataaagcggacaatgaaattgtggtgattgatactgcaccgacaggtcatacattgttgcttttggatgctacccaaagctaccataaagaagtagaacgtacccaaggagcagttacgggagcggtagccaatttattgccccgtttgcgtaatccaaaggaaacggaagtcgtaattgttaccttgcctgaagcgacacctgtatttgaagctgaacgcctgcaaatggatttgcaacgcgccggaattaataacaaatggtgggtagtaaatgcctgcctgtcaatgacaaatacggaaaattcatttttgcaggcgaaagcacaaaatgaagtaaattggattaagaaagtagaacaattgtcaaagggtaatgctgccttgattggatggaaaaatatataggaattggattttttgaaagatacctgactgtttgggtaactttgtgcattgttgctggtattgctatcggacaatggtttccggcaatatcgcaaacattgagtaaattagaatacgccaatgtgtctatacctgtggctatcctgatttggttaatgatttaccccatgatgctgaaagtagattttcagagtattaaaaacgttggtaagcgtccgaaaggaattatcatcacttgtattacaaattggcttataaagccttttacaatgtttggaatagcttatctattcttctacgttgttttcaagtctctaatatctgccgaattggccgaagaatatttagcaggggcagtcttattgggtgctgcaccttgtacggcaatggtatttgtatggagttatctgaccaaaggggatgctgcctatacattggtgcaggttgcagtgaatgatttaatcatattggttgctttcgctcctattgttgcttttttattgggcgtaggtggcgttacgattccgtgggatacattattgctttcagttgtattgtttgttgtcattcctctttctgccggaataataacccgcatactggttatccggcgaaaagggatagaatattttaatactgtatttatccgtaagtttgataattatacgactggcgggttactattaacgcttatcattctgttttcatttcaaggagaaaccatattgaacaatccgttgcacatcgtattgattgccgttccgcttgtgttgcaaacagttctgatattctttgtagcctatggttgggcgaaatggtggaaattacctcacaatatagctgcacctgccggaatgattggtgcaagcaatttttttgaattatcggtggctgtggctatatcgcttttcggtttgcaatccggtgctgcattggctacagtggtaggggtgttggttgaagttccggttatgctgatgttagtgagagttgcaaataatacatacaggtggtttacaataaaatcaagtatgagtaaatagaatactctagacgatacgtacaagaaatcaagatattgaaaagaaaactttgaattaagaataataaatattcattggtttaaaaacactattaaagtataagctgtacctttgcactgtctttttaaaaacatatattgttatggaacaacatccaattaaaattaataaagtacagatacgtaatcttcaaattgaagactatgcacagttatcccaatcgtttacccgtgtttactctgacggtagcgatgtattttggactcatgcccagataaagaaattaataagtatttttccggaaggacagattgtgacagtcgtcgatgataaaatcgtaggttgtgctctttccatcatccttgattacgataaggtaaagaacgaccatacgtatgcacaagttaccggtaaggaaacattcaatactcataatccggaaggaaacatcctgtatggtattgaggtgtttattcatccgggataccgtggtttgcgtctggctcgtcgtatgtatgaatatcgcaaggaactttgcgaaacattgaatttgaaagctatcatgttcggtggccgtattccgaattatcataaatatgccgataagatgcgcccgaaagaatatatcgcacgggtacggcagcgtgaaatttatgatccggttcttaccttccaattatcgaatgatttccatgttcgcaaagtaatgaccaattatttgccgaatgatgaggaatccaagcattatgcctgtttgttgcagtgggataatatttattatcagccgcctacgcaggaatatatcaacccaaagacgactgtccgtgtgggactggtacagtggcagatgcgtagttacaagacattggacgacctcttcgaacaagtggagttctttgtagatgccgtatcagattataaaagtgattttgttctttttccggaatatttcaacgctcctttgatgtcgaagtttaatgataaaggagaatcgcaggctattcgtggattggcaaagtataccgatgagatcagagaccgttttataaacctggctatcagttacaatatcaatattatcacaggaagtatgccgtatgtaaaggaggatggtctgttatataatgtaggcttcctttgcaggcgtgacggaacttatgagatgtatgaaaaaatgcacgttactccggatgaaatcaagagttggggattgagcggtggtaaactgctgcaaactttcgatacagattgtgcgaaggtcggagtcctgatctgttatgatgtggaatttccggaactttcccgtttgatggcggatcagggaatgcaaatcttatttgtacctttcctgactgatacacagaatgcttactcccgtgttcgtgtctgtgctcaggcgcgtgcgattgaaaatgaatgctttgtagtcatagcaggttgtgtaggaaatcttccccgcgttcataatatggatattcaatatgcacagtcgggagtgttcactccatgtgattttgcttttccgactgatggaaaacgggcggaagccactccgaatacagaaatgattctggtttcggatgtcgatctggatttattgaatgcactccatacttacggtagtgtgcgcaatctgaaggatcgtagaaatgatgtttacgaagtcagattcaagaaataagagtaaaagcgcctattgattgtaaaaagtatttaggcacggattatacggattaacacggttctaaagacattcatttatagcaaaaactgtgaaatccgtgtaatctgtgcctaaaagagagtaaacatatacctttgagacatgacttttctattatttagaagatgtgccgctttccaatatgctgacgatagaaaacagcgtgaagcaaatagctcccagtcctactaaaactcgtgccggaataaaataatcagcgtttacggtagcaagctcgaatacaaaggcagccagaaacaggcatgctaatgctgtcagtaccggaatcatagggattcggttagccagtttgaactcccgcctccatatcttggcgagtagaatcactttgctggaaatactgtaacataccaggccaagaccaagcatgatgtatccggtagtaccgtttgcacttcctgaatcggcaaggatgacgaatatgccccatacaaaagagatcgatcccattaataaaaccagtttcggccatttgttacgttctctttccgaatagtcgttccggacctgacgggctatggttgctaccaatgcaatcagactggtacaaatacatgcgagccctaccatcacatgacctgctacaaaataagcaggatgagagtgactgttgcttaacaggatgaacgcccatatccatgcgatacaggaaatgacgattgcgagaatgatcattgcccgtctctggccaatagaaaacgctccctccggcacttcatttccggtagctttggcattggccggaatcaaagaaaatcgggtggaagaggtagcggcggtagctacacaagctgtgataaatcctacaccggttatgacatgccctgcgacgaaggctgaagtagtggtagcggcattgaaaatgcagatacctccgacaatcgttatgatagctgccagatagcccacaacaggtaaaacgtattttgtagcttcattataggtatgtatgatttgccggattatagtggctgccgtacagaacagcgcaatgcatatcatacctagtgaaaatacaacaggacctgccaccagacggtttcccgcgtcaccataaccgtaaatgaatgctccgtatccgaagcaaaagaccgccatcgccaaagggattgctctgaataaaatactaataccgtaattcataacttaagtgctttttattttcccactaaaacaaggagatatccgttttgtttaacgcaacatccatttataaacgataacttcacatgattccaattaaaagtccttgctttttgctcaactaaacaaatgtttttgtaaatttgcacccttaaaaatggggatacccctcaaattgtaaattgtaaatagtaaaatcgtagatatagctatgggtaagagatttactgaatattcgcagtttgacctttcacaggtgaacaaagacgtgttgaagaagtgggacgaaaaccaggttttcgccaagagtatgacagaacgtgatggctgcccttcgtttgtgtttttcgaaggacctccctcggctaatggtatgccgggcattcaccatgtaatggctcgtaccattaaggacattttctgtcgttacaaaacaatgaaaggttaccaggtaaagcgtaaagccggatgggatacgcacggactgcctgtggaactaagtgtagaaaaagcattaggtatcacaaaagaggatattggtaaaaaaatctctgtagcagattataacgctgcttgccgtaaggacgtgatgaagtataccaaggaatgggaagacctgactcatcagatgggatattgggtggatatgaagcacccttatatcacgtatgacaatcgttatatcgaaacattgtggtggctgctgaagcaactgcataagaaaggcttgctgtataaaggatacacaatccagccgtattctccggctgccggaacaggattgagttcgcatgagctgaaccaaccgggttgctatcgtgacgtaaaggatacgacagctgttgcccagtttaagatgaagaacccgaaaccggaaatggcagagtgggggactccttacttccttgcctggacaacaactccctggacattgccttcaaatacagcgctttgtgtaggaccaaaaatcgattatgttgcagtacagacatataatgcttatacaggagaacctatcacggttgttctggcgaaagctttattaaatactcatttcaattcaaaagctgctgatctgaaactggaagattacaaggcaggagataagcttgtaccgttcaaggtagttgccgaatacaaaggtgctgaccttattggtatggaatacgagcaactgatcccttgggtgaaaccggttgaagtatctgaagacggaacatggaaagttagcggtaaaggcttccgtgtaatccctggtgattatgtaacgacggaagacggtacgggtatcgtgcacatcgcaccgacgtttggtgcggatgatgcgaacgtggctcgtgcagcaggtataccgtcgctcttcatgattaacaagaagggtgaaacccgtccgatggtagaccttaccggtaagttctatatgctggacgaactggatgaaaacttcgtgaaagaatgtgtggatgtagacaaatacaaagaatatcagggtgcatgggtaaagaatgcctataatcccgtatttatggtagacggcaagtatgacgagaaagcagctcaggctgccgaatctctggatgtcgctctctgtatgatgatgaaagcaaacaatcaggctttcaaaatcgaaaaacatatacacaactatcctcattgctggcgtacagacaaaccggtgctttattatccgttggatagctggtttatccgttctacagcctgcaaggagcgtatgatggagctgaacaagacgatcaactggaaaccggaatctaccggaacaggacgtttcggcaaatggctggaaaatctgaatgactggaacttaagccgttcccgttattggggtactccactgcctatctggcgtacggaagatggaacgagcgaaatatgtatcgaatctgtagaagaactatataatgaaatcgagaaatcggtagctgccggatttatgaaatccaatccgtacaaggataaaggttttgtaccgggcgaatacaccgaaggaaattatgataagatagaccttcatcgtccgtatgtagacgatatcattctggtatcggaagacggtcagccgatgaagcgtgaatcagacctgattgacgtttggtttgattccggtgctatgccttatgcacagattcattatccgttcgagaacaaaaacattctggataaccgtgaagtatatccggcagactttatcgcggaaggtgtagaccagacacgtggatggttctttacactgcatgctatcgctactatggtatttgatagtgtgtcgtacaaagccgtgatctctaatggactggtgctcgacaagaacggtaataagatgtccaagcgtcttaacaatgctgtcgatccgtttactacgattgagaagtatggttctgacccgttgcgttggtacatgatcactaactcatctccatgggacaacctgaaatttgacattgacggaatcgaagaagttcgccgtaagttcttcggtactttatataatacatattcgttctttgcgctgtatgccaatgtagacggattcgaatataaggaagcagatgttccgatggcagaacgtccggaaatcgaccgctggattttgtcagtattgaatactttaatcaaggaagtagatacttgctataatgaatatgaacctactaaggcaggacgtttgatctccgactttgtcaatgacaatctgtccaactggtatgttcgtctgaaccgtaaacgtttctggggtggtgaatttactcaggataaactgtctgcttatcagacattgtatacctgccttgagacagtcgcgaaactgatggcgcctatttctccgttctatgcggatcgtctgtacacagatttgactactgctacaggacgtgataatgtggtttctatccatttggctgaattcccgaagtatcaggaagaaatgatagacaaggaactggaagctcgtatgcaaatggcacaggacgtaacttctatggtattggcattgcgtcgtaaagtgaacatcaaagttcgccagccgctgcagtgtatcatgattccggtggcggatgaagagcagaaagcccacatcgaagctgtgaaagcattgatcatgaacgaggtgaatgtaaaagatatcaagtttgtggatggtgctgccggcgtattggtgaagaaggtgaaatgtgactttaagaagttaggcccgaaattcggcaaacagatgaaggctgtggctgctgctgtagcggaaatgtctcaggaagcgatagccgaactcgaaaagaacggaaagtatgcgttgaatctggatggagcggaagctgtgatcgaagctgcggatgtcgaaatcttcagcgaagacattccgggatggctggttgccaatgaaggtaaactgactgttgctcttgaagttactgttaccgaagaactgcgtcgtgagggtatagcccgcgaattggtgaatcgtattcaaaatatacgtaagtccagcggtttcgagattacggacaaaataaagatcacaatctccaaaaatacgcaaacagatgatgcggtgaacgaatataatacttatatttgtaaccaagttttaggaacatctcttgatttggcagatgaagtgaaagacggcacagaacttaattttgacgatttctcattgtttgtcaatgtgataaaagactaatactaatattgattaaccttttaaactagtaaagttatggcagaaaagactagatattcggatgcggaacttgaagaattccgtgccattattatggagaagttggagttggctcaacgtgattacgatcagttgaagatgagcttgatgggattggacggtaatgatactgacgatacatctcctacttataaagtgttggaagaaggagctaatacgctttcaaaggaagaaacgactcgcctggcacagcgccagctgaagtttatccaaggattgcaggcagctttggtacgtattgagaataaaacgtatggcatttgccgtgagactggaaagttgattccggcagaacgcttgcgtgctgttcctcatgctacactcagcatcgaggctaagaacagtggtaaaaaataatagatagctacaagctacggatgacgagctacaagtagctgcgcaatgtttacgcacggcaacttgtagctcgttatgtttaatttatgatgaacaaatgaagaaactattcacgaagggtagaattgccctgcttgttatcttttccgtactgattattgaccagatcattaaaatctggattaagactcatatgtattggcacgaaagtatacgtgtgacagactggttttatatctatttcaccgaaaacaacggtatggctttcggtatggaaatatttggaaagttgttcctgaccactttccgtattgtagcagtagggctgataggctactatctctataagattataaaaaaaggcttcaaaaccggatacatcgtctgtgtggcccttatcctgaccggagctttgggtaatattatagacagcgtattctatggtgtctttttcaatgaaagtactcattcacagattgccagttttatgcccgaaggcggtggatattctacctggttctatggcaaagtagtggatatgttctatttcccgattattgacacaaactggcccacatggatgcctttcgtaggtggagaacattttatattcttcagcccgatctttaattttgcagatgctgctatcagttgcggtatcattgctttgctacttttctatagcaagtatctgaacgaatcttaccattcactggataaaaataaaaaggaaagcgtagatcatgaagagtaggtttcggtttcatctgtgttgtgtttgtatgttggcgcttgcggtagcaggctgtaaagtcaaaagacctgacgatgtaatctcagaatcgaagatggagaatttgctgtatgattatcatctggcaaagtctatgggagataatctgccttataatgagaattataagaagactctgtatctcgatgccgttttcaaaaaatacggtacaacggaagctgtattcgattcgtctttggtatggtacacacgcaatacggaggtattatcgaaaatttatgagaaggtgagcaaacgcctgaaagcccagcagaatgaaataaatcatctgatagctttgcgtgacaataaaccgaagatgtcggaaccgggtgacagtattgatgtctggccctggaaacgtttcatacgtctgacgggtgagatgatgaatgatcagtatgcctttgtattacctgtcgatactaattataaagatcgtgatacactggtttgggaagtacgttatcgtttcctcgaaccgatgcttgccgattctttgagagctgttacgatggcaatgcaggttatttatgagaaggatacgctgaatcatttggaaacaatcactgatccgggtgttcatcagatacgtttgtatgcagacacattgggtgtgatgaaggaaataaaaggctttatctattacccgggagtacagggagagaaagccggtgcattactggcagaccgctttgctttaacccgttatcattgttcggactcgctttctgtagccgaacgtgattcgattaatcagctggaagctctgaagacagattctttaaagaaagtatctgatcaaaaagatactaagatttcgaaagactctttgcgaaaagtcgatgatctgaaggataatcaacgtatatcaccggaagaaatgaatcgccgtcgtacggtgactcctgaaaagaagccggaacagattgaagtagagcaacatatccagcaggagaagattgagcaaagaagggaacggcaattgaatcagcgtagaaatcagcaaagacgtcagtcaccttcccgttaatattatgaaacgctttgccgctcattatttgcttctgcctgatgttggctttatcagacaacaagtagtagagattactgatgaaggatatgtacgggatgtttttccgttgacggaagaaatagagtctgttgaatggatgcccgggctgatagcattacttcccgagaataaaataaaaaacactgagatgttcagcaaaaacatctcagtgtttcaatttaatcttccaatagtttcgggacaaactttcccatgttttaaagaggctcttacagcgtctgcaaagaggggagaagtactgtttccttatttattttatccttttgattttacttccatgcagcctgtcgccggaactcggcacagattactgcggtagcgatagctacgttgagagattccgaggtttcttttccttgtggataattggggatataaagtttccgattgatgagtgcttccacttcttttcctattccgttaccttcatttcccattacgatcagtccgttggtggataatggttgttcgtacatgttttctccatccaaaaatgttccgaatacaggagcatcaccgagtgaatgaataaattcgggaagagaggtgtaatgaaccttaacacgggcgattcctcccatagtggcttgtatggtcttgggattgtatacgtctaccgtgttctgagagcagataatatgttcgataccaaaccagtccgccagccggataatcgtacccaggttccccgggtcctgaatatcatccagtgccaggcaaagagactggcgtgcgaaatccggacttaacgtatattgcggttgctcgaaaacagcaagtacttgctgtggtgttttcagcaggctggcacgtgatagttcttcttgagagacttctgcaatttcatttgcttgaatgtcgggatgcgcttgtaaccatgaagaagttgcagccagaaaacggcaagggaaatgtcctagtaaatcgcctgttaatttaggaccttcggctaggaatacctgttcctctttacgggttttctttagttccagtgaatggatatactttattttatttttgcttagcattattcttttacttctttatttaccgcaaagctataaatatatttttaataaatcggctgttgaacaagttttttgaaaataattctttctcatattaacaatatttgcatgaataaaaattgattatctacttaattttagtagatttgcttaaaattagtagtttgatattcagtataaaagatgacaatatggaaagattgacacaacaagaggaagaagtgatgatttacttttggaaaatggggcctagttttatccgggagattgtgaatgaaatgccggaaccaaaacctccatatacaagtgttgcctctgtagtccgtaatctggagaaaaagaaattcttgtctcctttcaagttagggaattctattcagtatcatgtgctggtgaaagaaagcgactataagcgtagctttatgaatggagtagtaagtaactattttacaggttcgtacaaagaaatggtttccttttttgtccgcgatcgtaaaatcagcaagaaagaactcgaggatttaatcaatattattgaggatgaagaatcataaatcaagataggcatggaatcttttgcaatctatttgattaaagtaaatatagctttgattgtattatatgcattctataagctctctttcagcaaggatacattttttaggctgagacggatcatgttgctgctgatatgtgtgacttcgctgatttatccattgattgatttttcaggctggacggacgagtatgcaataggagaaacgtttactaccgtttacaataaactgttaccggaagtgctggttactacggctttacccgttgctacaacagaagttgaagtgacaacctggcaggccggtacttggttatggattatttatggattgggaataggtatgttgttactgcgtaatcttttagaagttagtaaaatacatcgctctttagtctgctctcagcgctattctctgaaaggtgtacctgtttatcagtcagaagacgtaggggagccctgttccttttttcattggatattcataaatccgatgcaatattcggataaggaaattaatgagatattgatacatgaacaaactcatgtccgtgagttgcattcattggatataatactggttcaactggttatattattatgttggtttaatccgttctcctggttgatacgcagtgaaatacgtatgaatcatgagtatctggcggacaagcaagtagtgacgtccggctatgacaagaaatcgtatcaatatcatttgttgggaattaaacatacttcattggctgcagcaaacttctataacaactttagtgtattacccttaaaaaaacgaattaaaatgctaaacagaaaaagaactcataacatcatggtaggtaagtatctgatgtttataccagtggccgcattattgctgttattcagtaattgcgccaataagaaagcggataaagtccagtctgataccgaaaaagcagataccatagagttgactgctgaaccggagaaaacagcagaacctcaagttgatataacgatcacggagacgaaaggtgattctatttattcagtagtggaaacgatgccggatttccccggaggacagaaagaactactgagttttttgagtcgcaatatcaagtatccgacgaaggcgatagaaaataaaattcagggtcgtgttattgtacagtttgtggttaacaaagatggtagtatttttggtgcgaaagtagtacgtagcgttgatccggatttggataaagaagctcttcgagtgattaattcgatgccaaaatggaagccgggaatgcaaaaaggggagcctgtatctgtgaagtttacagttcctattgtattcagaaatcaactaaattaggaatcttattcgccacgatttatagaagtaattgcaaggatacatagtcagtaatatataggtattagcaaagcataccttgcaaatttctataattcgtggtgaaaagaacttttgtcgcattaattattgttttgataatttccccgaacgaaaaatatgctctatctttgtccctatatatttgcttccgcttttatagagatactgtatgaggaaaggatttctttacttatttacttttgccgttatcattctgtcgctcgcttcgtgcactgccactaagtatgtgccggatggctcttatctgctggatgaagtcaagattcatacagatcagaaaaatgtccgtccttcttccttacgaatgtatgtgcgacagaaccctaatgccaaatggttcagtttaatcaaaacacagctttatgtttacaacctttcaggacgagactctactaaatggggaaataagttcctgagaagaatcggggatgctcctgtaatctatagtgagactgaagcgcagcgctcgcaagatgaaattacaaaggcaatgcgcaatatgggctatatggcggccacagtgaagcgttcgactaaaataaagaagaaaaagatcaagctgtattatgaggtgacagccggcgatccttatattgtcaattcattaaaatatgatattcgtgatcctaagattgctgattttctgaagcaggattccgccaaaagtctgctgaaagaaggaatgatatttgatgtgaacgtgctggatgccgagcgtcagcgaattactgacaagttgcttcggaatggttattataagttcaataaggattatgtcggttatacggcagatacggttcggggtacttatcaggtagacttgaccttgcatttgcacgcctacagagcgcatgtgagcgattcggtgaaagcacaccaacaatattggataaataagattaactttattacggattatgatgtcctgcaatcttctgcgctgaacagtatggatatcaatgattctcttcattttaaagggtaccctatttattataaagataaactctatttacgcccgaagatgcttactgataatcttcgctttgctccgggggatttgttcgatgaacaggatgtgcagcagacttattccaatttcggacgtctgtccgccttgaaatataccaatatccgttttcttgaaaatcaggtaggggatacggcgaagcttgactgctatgtgatgttgaccaagagtaaacacaagtcggtagcttttgaattggaaggaaccaattcagccggtgatttgggagcagcagcttccgtctcttttcaaaacaggaatctctttcgcggttcggagacttttatgatcaagtttcgtggtgcttatgaagtgatttccggacttcaggcaggctattctaacaataattatacggaatacggggtggagacaagtatcaactttcctaatttcctgtttccttttctctcttcggactataaacggaagattagggccactacagagttcggattacagtataattatcagatgcgtcccgaatttctacgtaccatggcatcggcttcatggagctataagtggactcaacgccagaaaatacaacattgtatcgatttgattaatatcggtttcctttatttgccgagaatttcggagaggtttaaggatgattttattaacaaagggcagagccatattcttcagtataattatcaggaccgtttgattattaatatgggatatagctatcattacaatagtattggtggtgccatcattaataatacaattgcttccaattcatattccatccgttttaatttcgaatcagcgggaaatatcatgtatgctttatccaaagcaacgaatatccgtaagaataatgatggggaatatgctattctgggcattccatatgcacaatatgtgaaaggagaatttgacttttctaagaatataaggatagatcatcgtaactcgtttgcgtttcatataggtatgggcattgctgttccttacgggaatgcgaagactatcccgtttgagaaacaatacttttccggtggtgccaacagtgttcgcgggtggacggtacgtgacttggggccgggctcttttgtgagggatgaaaataccaatttactggatcagtccggtgatatcaagctggatgccagcattgaatatcgaagcaaattattctggaagtttcagggagccatctttgtggacgccggtaatatatggaccattcgtgattatgacaatcagccgggaggagtctttaaattcgataaattctataagcaaatagcggtagcgtacggattagggcttcgtctggatctggatttcttcattcttcgttttgacggaggtatgaaggcgcttaatcctgtttatgaaaaggggaaagatcgttatccgattatccatcctaagttcagtcgtgattttgctttccattttgcggtaggatatcctttctgatcaatcattgctaataaaaaaggagatgaaactggttgtacggtttcatctcctttttgtttatggtatatgcttttaacgagcggcaaacatcaggttgctcatagtagcctgacgggcagccatcataccttgagcgtccaatgtaacgttcattttttcgccgtttggtaagaacagatcagcagtaccgtcgttattcatctttagcaactcagagctttcgccgtttgcaactacattccaggtattagcttctttgttgtagatcaaatccatagaagctgtttcgccttccttcgtaattgaatagccattttcaagtgttttaaccatatagttaccgttttctccttttaccttcttcacgtcgcccacattagccatcgggttggaaccactccagaattcgatagagttgattactaaggcatcagcaaggtatgctacgccataaaccggaacaatgttgaaagctaaaaatacaagctcatttacaaatttgtttccgactccttgattccaggaacttaaacggttgaataagccaaatgatccaacacaggagctgaataataagctaccactaagtacaaccgctactaatgtcagtttgctttttttcatgtttactttactttttgattaataaaatgttgataaattctctttttaatagatgcaaatataacatttttaaattaatcaaggttattatttcttgtttttatatcatttacgtttgttgtgtgccaacttgtttccaatgaaatgatctatggaaaatttaccgggtccggcaatgtacattaatacaaatactactaagtagatgaatgccaattcttttactgcaaatacgtcattagcatggatgacaaaaaaggcaactatcatcgtaaaaatcatcgggatcattgccaagcggtacagaaagccgaagatgaagcccattgaacataccaactcaccaaagatcgccaaaccgagggatatggaactgcccagcccgatcggatcaggaaaagccgtggataactcctggaaattgctccatttctgtataccgtggttcattaataatattccgaaaatgatgcggactgccaataaaaacaaggatacttttgttgtatttggctttgtggggaataagaaattataaatcataagtcgttctttttataagtttgctttttatttatataaacataaaaaatattgaaattgttctctgaaaacgataaaacatagaaacaaaaaaagataccggaaataaaatgactgatcagccgctttgtttccggtatcttttgataaggacaggattttcttgtctattctttgtttagaatataatgttcggcaagtgctcccgttatttcttgtttgtcatcgtttaacagacgaactttgttttcttctactttataataagatatttctccaccttcttcttttaaagtcaggatattaccttccagtgtataagttcctttttcatcaaatgaactgtcccggtcgatgtatacagagtgaagagtaaacgtcttgtcaggatttaatgtcagagttgtttcaatgcccggacagtcggcagcaggaaagacacctttataggtcccttcataatcaagcgatgtttcggcattatgtatatcagccacttgggttgctgtactgtccgcacttgtactattgtttgttttcgcactgtttccgcatgctgccagaagaaagcaggaacatgccagaatgataacttttttcatgatcgttacttttaatagtttatctaattaagtttatagttcgtaaaggtataaataataagttgaatccgggcaataaaaagaaccgaacaacttaatttatgaatttataaacggtcaatactatcagagtacttagataaactttataattgtatgttaacatataacttaccatttctttgagaagagttcaagcaactgacttttcttcaatggtttggcaagaaattcattgcatcctgcgtcaagggcgctgattctgtcagcatcaaaagcattggctgtaagtgcaataataggtatcctattattaaactcacggattttgcgggttgcttccagtcctcccatgacaggcattttcatatccatgagaacaagatcgaactcttcctcacgtactttatttactgcttccgctccattttgaacatgggttagatggtagcttttgagaatatgttgcactaacgaatagttactttcattatcttcggcaattaatatcttcagttccttcttgtcgatttcgttcaaagaaagctggtgttgcaatggcagtgaaatagttgggttatgttccttctgagtgctgatttcacaaggaatccatgcccagaaagtcgatccaataccgggagtggaagtaaatccgacttctcctccggctccttcaatgatagctcttgagatagccagtccgagtccggtgccctgagcaaactcattgagcttctggaaacgtccaaacactcgttcctgtaattcttccgggataccgactccggaatcttccacatagatccggattccttctctttcgatgctgtatcccatttttatatatccggatttggtgcatttgacagcgtttgtaagatagttcatccatacttgcttgagccggcttctatccaggaaaatccaacagtccgggctggaattgtccatttgaaactcaacatccggattggtaatctttggctggatcatggtataaagctcgttgcatactttggctaaattgaatgtttctcttttgcgatcaagaattcctgattcaatcttggaaaggtcgaggatatcattgatcaatcgcaataacaactcattattggattggatgatgctcatgtattcttctttttctgccggatcttcagaatataccatcagttcggagaagccgacgatcgcgttcaggggtgtacgtatttcgtgactcatattggcaaggaaagccgatttcaggcggtcggaaagttcagctttgtctttcagctcctttagttgctgtgccattttctcccatttcgtattgttgactttaataccggtgtagcgaattacattgcctttcttgtccctttccactggtatgccagtaacaatgagagtctgccattctttgtcccatttagttttggatcggaatttgaagttgagatctttagttgttcctccaatcatataattaatatggttgcggacctgctcaatgtcttccgggtgggtgacatgcagatagtcttcgggtgtgattgcattttcagaatggaagtcattcacggggtcattaaatgctttgaattgtttgctttttacttcaaaatcccagtaagacatgcctacagtcttgaaggtgagctgcattttgtagtttctttcttcaagttcttcattcagttgatgaagtttggagatattttgtctgaatccggtatatcgtacgttgttaccatattcgtctttctcgaatggaacacctatgatattacaatattgccaggattcatcatacttcgtttgcatacggcaagtgaagttaatggtgagttccttgcctgatagcatagactgtatggcgtcataggatgaagaacggtcttcaggatgaataacatccatgtatcgttggatggtcaccagtttatcactggcataatcattgatcgggtcattataggcttcgaactcttgagtccgtacatcgaaatcccaatgaatgatattgctgactttcatggccagttcacgcttggcgattaattcctgcgtcttctttaccatttgcattctttccgttatatccagttgggttcctataatctgcaatttcccaaaatgttcgaaagataaccgcatcatgctttcataatagcggtattgcttttcttcttcattatagaaacgtaaggtgatgtttccttgctgaatttctttgttggtcagttgtgataaaagttgtattaaaggttcatgatcttgtggatgcaatatatttagaatctgatctaatgtcgtgttatttttagctacaggatctccatgtaatggattgaatgttttcttatacacgtcatatacccaagatgacatagaggccgcttccattgccatttccagattctttttgctttcatccgtacgaaattcagcttcttttatggcagtcacatcgttggaaagcaatatatgcccgatgatttctccctccttgcttcgcaggggaacaacctttgcttcataaatgatcgtgttcttattttgggtagagaagtatgcgttgtcttttatccggtcaaagtcgtattcgaattccagaacaatatcttcgcctctctgaatgcgatttttgagagtttcgtccatataaggactattaaaaagattgacgatattaaccacagtcgttttatcagtgactccatacatctgcaatgcatgttcattgatactgcgcaagataccatttgtgtcatagatctcaatactcattggcagacaagcataaatactttctgcaaacagaagttgatcttttgttaaagggaatgtttctggttctgaagatgacattacattttgggtagtaggttctgtttcacttgggttcatttgtcctttgtttttgtctatgtatgatgctctgatttgtttgctattgattaatttatacaacttcttgattgctgcaagaagctatatgttcacaaacatacaataaaaatatggaataaagaaattaacactaataaaagtgaatgacaactttgcatttgattaatgtcaggaaagcatgaaaggcatcttttcactctcaagaaatctatattatataaggtgaaatactaaaagtgcttgtccgggtctgcatattctcgtttttatctttatctttgtaggaaaatataaaaatatggcacaacatacttatgatgaagaatcggtccaggagctgttgggctgggcgaagaagatgcttgaaacgaagagttacccgacagaaaagtatcaggttaatgcatgtacttcaatcattgatggtaaactttatctggagtctttaatttcgatgatttccaaaaattgggaaaatccgacttttcatcctactattgaacaactgtgggaatatagagaaaagtgggaaggtcaaaaggagtaatgtaagtttcagatctcctcagaaaatacataatgcactctgaagcgatgtgcccggagtgcattatgcatttttattaatggatgtaagtctgatctttcgcgtcggagattaaaacggcaaccattttctttttttcttctgactggtattttcttctctttgctggctgtatatatcggcaaatgtctttttctcttttatcatttcatagataattccccagtcgggaataccgccgacattccggtcgtctataaacagatcggctttcagttttcgggaaaagccctgatgatctctttcttcttccggatagtctttattggctgcataaaactccagtcctctggctctgcaccattctatggcttcgtccaaaagttctccctcgcgtacactccacaagattaaacggtgcttttcttgttgtaacaatttcagcgtttcaactgcaaatggaatttcttcaccaatacgtggataacgatgctctacaatcgttccgtcaaaatcaacagctatagtcattatgatatatttagaatacgtaatttaggacaaagatacggactgtaagctaaaaaaacgtatatttgcgctgaattaacattttaataaaaaaacagagattacatgaacaattcccctcagcgtgccgccaaaggttttacaagagccttttgggtgagtaacacagtcgaactgtttgaacgtatggcatattatgctgtttttatcgttctcactatttatttatccagtattttaggttttaatgatttcgaagcaagtatgatttccggccttttctccggaggattatatctgcttcctatattttcgggtgcttatgcagataagataggtttccggaagtcgatgattattgccttttctttattatctatcggttatttggggctgggcgtattccctacattgctcgaagcggcagggttggtgagttacggtgcgactacccggtttaatggtttgccggacagttcttcccggtggattatcgttcctatcctgtttatccttatgataggaggttcttttatcaagtctattatttccgcatctgtggctaaggagacaacggaagcgacccgcgcccgtggttattctattttttatatgatggtcaatgtcggtgcttttacgggtaagacaattatcgaccctttgagaaatgtgatcggcgaacaagcttatatttacattaactatttctccggggcgatgacggtgattgccttgctggcagtgatcctgctatataaatcgactcatacggcaggtgaaggaaaaagtctgcgtgagatagggcagggctttatgcggattatgactaactggcgtttattgattctcattttaatcgtaacaggcttctggatggtacaacagcaactttatgccactatgcctaagtacgtcatccgtctcgcaggcgaaacggccaaaccgggatggatcgcgaacgttaatccttttgtggtggtatgttgtgtcagctttatcactcgtttgatggcaaagcgcagtgcgattacttcgatgaatgtgggtatgttcctaattcctgtttctgcattgctgatggcttgtggaaacatattgggaaatgatattatctcaggaatgagcaatattactctgatgatggtggctggtattgttgtacaggcgcttgccgaatgtttcatttcgccgcggtatctggagtatttctctctgcaggctcctaagggagaggaaggtatgtatttaggattcagtcatctgcactcattcctttcttctatattcggtttcgggctggctggtattctgttgacaaaatattgtccggaccctgccttgtttgaaactcgtgcggcatgggaggccgccagtgcgaatgcgcattatatctggtattatttcgctgctatcgggctgattgccgctatagctttgctattattcgcaaaaatcaccgaatccatcgacaaaaagaagaaatcttctcggtaattatcttcttttttatgtatatttgccgtcactttgctgtaaaagttgacggcattttgcattttaataaagaaagataaaacatgaaagtaagatttataagcctggcgagtggcagcagtgggaactgctattatctgggtactgatacctatggaatactgatagatgccggtatcggcatccgtaccatcaagaaaacactgaaagatttcaatattctgatggaaagtatacgtgccgtatttgtaacgcacgatcatgcggatcacatcaaggctgtagggcatttgggggaaaagatgaatatacctgtttacaccacggctcgtattcatgaggggattaatcgtagttattgtatgacggaaaagctcagcacatcggttcgttatcttgaaaagcaagtgcctatgatgctcgaagatttccgtatcgaatcttttgaagttcctcatgacgggacggataatgtaggatattgtatagaaatagacggcaaagtcttttctttcttaaccgacttaggggaaatcactccgacggcggcagattatatcagcaaggcaaactatctgattctggaagcgaactatgacgaagaaatgcttaaaatgggaccttatccccaatatctgaaggaacggatcatgagcaggaccggacacatgagcaattctgctactgctgaattcctggcagaaaatatcaccgagcacctgcgttatatctggttgtgtcatctgagcaaagacaataatcatccggagctggcatataaaacggtagaatggaaattaaagaacaaaggtgtaattgtaggtaaagatgtgcaactacttgctttaaagcgaaatacgccttctgagctttatgtgttcgaataataacgaaaaaaagatagtaaaaaagctgcattattgtttggtcaaatgaaataaaagacctacttttgcaaccgcaaacgaggaaataagcactcttagctcagttggtagagcaactgactcttaatcagtgggtccagggttcgaatccctgagggtgtacaaatccaaagttgcaatataaaaaaatgttgcactcttagctcagttggtagagcaactgactcttaatcagtgggtccagggttcgaatccctgagggtgtacaaagaatgaagaagtaacttagttacttctttttttgtttatatgaactgccttgtaagggatcagttgtaaatcttgtgaggactactcttcaactcaatttgagcctactcttcgggacttgttgctccttagcccgaaagatgcttgccgatttaatcagacctgcctggtttaatagtctatgcttcgttgattaatcccttttgtatgctaagttaatgtcttttgaaagcaataagaacaagtttcaggtacgtgatcccatcggttcatgtacgtgggctgatgggatcacgtgcgtagtctgaatgtttcacgtacgtaaaacgagagcatatatcctgcaaaatgtattaatcaaggcttgttgatgtattaggtataccggctttaactattatacatgccatctaaaatctcttaggaggccaaagaagcatcgtttaatgctttagcaaataaaattttgttgttgactggagggagaaataatggattaataggaattatagaaggcaaaaagggggtgaaaatacaattctcgggtcgaaaatacagttctctgtgataaagagaaaaagatgttagtttctgtttaaatgttggtaatcagtgtagtaggaaatatgggtgataatagaaggtgataaatgaattcatataaattctattatcaccttattatcaccgcttattgtcaccactattttattgattactaactctttaactataaaaggtgacaagtgacaatagaatcgtatatgaaactacaaggagaggaacgttagttttaaaaaaaaataccgctgtggagcatcgtgccccgacagcggtattactatttagtaattcttgttttagaatttgaagaagttcttggcattgttgtagctgatgtcttcgatcatctgatttacgcgatccatttcagataccggaatttctccgttctccacatcacgtcctaccaaattacataatgtacggcggaagtattcgtggcgtggataggaaaggaatgaacgggagtctgtcagcatacctacgaaacggctcaaaagtccaagtactgacaacgcgttcatttgtttttccataccatctttctggtcgaggaaccaccatccggaaccgaactgaatcttgccggctatcgagccatcctggaagttgcccagcatagtggcaatcacttcattggcgcaaggattcaggttataaaggattgtcttggtcaacttgccgttaacgttcaggcggtcgaggaatttagacattgccttggctgttgtaaattcgccgatagagtcgaagcctgtatcgggtcctaacaatttgaacatcttcgtattgttgttacggatagcaccgtagtggaactgctgagtccatcctttttcccagtccatttctccgaagattaccaacatagcagacttgaatttcagaatttcttctttagtcaattcagctccgccatataccttattaaatatagctttgatttctgcgtcggtgtaatcttctgcatagaactcttcgataccgtggtcggacaagcggcagccctgttcggcgaagaagtcatgacgtttgcggagagccgcaatcatatcgtcgaaattggagattgtcacgccgcttactgcagacagtttttctacataagcgcggaagtcggcaggaacttctactgccattgccttgtccgggcgccaggtaggcaacattttgatttcaaaaccgctttcgcgtgtctggatatgatattccagagaatcaatcggatcgtccgtagtacatactacttccacgtggtaacgacgcatcattccgcgagctgagtattctggctgagccaacttctcgttacactcgtcgtaaatctcgcgtgcagtcttggggcttaaaatcttgtcgatgccgaaagcagtcttcaattccaggtgtgtccaatgatacaacgggttgcggaaggtataaggaacggtttcagcccatttttcgaacttttcccagtctgtggtatcttttcctgtacaatagcgttcgtctacgccatttgtacgcattgcacgccatttgtaatggtcgccacccaaccagatttcagtcagtgatttaaacttgtagtcgtcagctaccatttgggggattagatgacagtggtagtcaataatcggcattttagccgcatgctcgtgatacaacttttgtgcagtttctgtctgcagcaagaagttttcatccatgaagttcttcattgttactgtgtttttagtatataaaattattactttctgcatttatacctatatagtattgattttaaagctaataggtgtaaatcttcgttttagttttattaaccgttatcgaacacaaaaatagaaaatttacttggagtaacaaaataattcgtatatttgcagcgattatttataatatttaagttttagcactatggaggaccagaactataccatcaaagacattgcccgtatggcgggtgtttccgccggaacggttgacagagtgctgcacaatcgcggcgacgtatctcctcaaagcaaggctaaagtacaaaaggtattggatgaaattcactaccagcctaatgtatttgctatcggactggctgccaagaagaaatattctttcgtttgtctgataccttattatatagagcacgactactggcattcggtagtgggaggcatcgagcgggcacgtcaggaattgcgtcctttcaatgtgagtgtggattatctttgttaccatcaaggggacaaggacagttatcaggaagtgtgtcgcagggttgaagaaagtaatgtcgatgctgtactgattgctccgaacttcagaaatgagacattggctttgacagactatctgcaagctaaaaaaatagcttatgcattcattgacttcaatatggaggaagcgaacgcactgacctatatcggacaggactcttataaaagcggatacattgccgccaaaatattaatgcgcaactatcaggccggtgaggggcaggagctggttttgttcttgagcaataataagaacagtccggcagaaatacagatgcaacggcgtttggcaggatttatgagctttatcaccgaagagtatgaagagttggtgattcatgaagtggtactgaacaagtctaatcaggaaaataatcaaaagacattggatgaatttttccggctgcatccgaaagctacgttgggggtcgtattcaattccagagtttatcagctgggcgaatatctccgtagtgcgggacgaagcatgaaggggttgataggatatgaccttctgaaagcaaacgtggaattgctgaaatccggtgatgtgcattatctgatcggacaacgtccggggctgcagggatattgtggcgtaaaagctctttgcgaccacgtcgttttcaagaaatccgttgaaccggtaaagtacatgcctatcgacattatgataaaggaaaatattgatttttatttcgaatttgtataatatcaactttataaattacaactaacatgaaagcattaaacaaagaaacagctcctaaagtacaacgtctggagcgcattatccaatttggcgaaggtaactttttacgtgcatttgtagattggattatttacaacatgaaccagaagactgacttcaacagcagtgtggtagtggttcaaccgattgataaaggtatggtcgatatgctgaatgcacaagatgatttgtatcatgttaaccttcaaggattggataaaggagaagtggttaacagcttgacaatgattgatgtaatcagtcgcgcattgaatccttatacgcagaatgacgagtttatgaagctggctgaacaaccggaaatgcgctttgttatctcgaacactacagaagccggaatcgcctttgatccgacttgcaaactggaagatgctcccgcttcatcttatccgggcaagctgactcaattgctgtatcatcgttttaaaacattcaacggtgacaagacgaaaggtctgatcattttcccttgcgaactgatcttcctgaatggccacaagctgaaagaaacgatttatcagtatatcgacctgtggaatcttggcaatgaattcaagacttggtttgaggaagcttgcggagtatatgcgacattggtagaccgtatcgttccgggattccctcgcaaggatattgctgctatcaaggaaaagatacagtacgatgataaccttgttgtgcaggctgaaatcttccacctgtgggtaattgaagctccgcaggaagtggcaaaagaattcccggctgataaggcagggctgaatgtgttgtttgttccgtcggaagctccttatcacgaacgcaaagtaactttgctcaatggtcctcacacggttctttctccggtagcatacttgtcgggtgtgaatatcgtgcgtgatgcttgccaacatgaggtaatcggcaagtatattcataaagtgatgtttgatgaattgatggagacattgaatcttccgaaagaggaactgaagaagtttgcagaggatgtattggaacgtttcaacaatccgttcgtcgatcatgcggtaacaagcattatgcttaactcattcccgaaatatgaaactcgtgatcttccgggattgaagacttatctggaacgtaaaggggaactgccgaaaggactggtactcggattggctgctattatcacttattataaaggtggtgtacgtgcagacggggctgaaattgtaccgaacgatgctcctgaaatcatgaacttgctgaaagagctttgggctaccggttgcacgaagaaggttaccgaaggtgtactggcagcagagtttatctggggcgaagatttgaataagattccgggactggcagcagctgtaaaggctgatctggattctattcaggagaaaggtatgcttgaaacggtaaagggtatcctttaagtaagtaatatcatataaaaacagcgtcactgttcgttgtgaatggtgacgctgtttttatgtgtatatatgatatcaaagatagttctgatagaaaggagaaaaacagttttctttctattcagcttcagctgtatgaagaatgaatgtggtagctccgatagttacgattgctccgtcttccatgcggacgcggtctttatctcccagaatctcattcatgagaaaggtacctgtgaggctgggggcgtcccgtaatgtgtagacaagctttccctgtttgttacgcttcacattaatgatgcagtggcgtctgtccatactcatgtcaccgctttcgatcggagtattgataacggtacccacgcaacgacggcctatcacattatcaccttcttgcaacggaagtacttgtttgaaaccaaacacgttttcaataaccgtaatataaccgaattcttctttatgaacctccgcttcttcttccaggttctcttcctttctaagggcttttactttgctttttccgagacggatgctgaattgtttgccacaatgttcgcattcgaatacaagcgattgaccttcgctgtatttggtttcatcaaaaaaaaggtaattctcacatttaggacaaagaactcgtttcatgtttcaaaaggggatttattttgccagtaaccaggcattcttataagtttcgttttttctaagctccagtagttgtttggtagcttcttcgcgatttccgaatgaacggatgctgacacgtactttgccatcgctgttcaaggctttcgcttcggcaaatccttttgcctttaattgttctgccattgcttcagcatctttcagaccgattcctcctgctacgataatgtgaaagggatgattggcctgtggctgaactgcgggtgcaaccggagttgtcactgcggttgtagtcggtattgttgctgtcggtgcggccggtgttgtttcctgcttggcaaccttgacttctttgacagcgataggtcttgaagttctggctttatcagcggtaactttcttcgtctgaccagtcgcattcttttgattatgctttgtttctacagaaacaggagtgactgcaaccgattgtttttctatttgctcaaaaagctcggcaggcagcaactgggcataattgttcttctcgacatacgtattttctacaggagtagagaatgcgaagaacataacgataacggcaatcattgccgcagcattacgaagaagggtacggctgatgctgatttcatacgttttcttttctttcgtcagactggcaggtaccagtattctttcttttcgctgcaacgcagagagctcacgcatctcaaaagaatccaatccatataatgaaggagtcgttatcttatgatcataaggagtgaattcgtagttcccgtaaatgttataacggatttcacccacgttttccaaatcggctttaccttcttcatgaagaatctcgacgaaggcgttcacttctttctccaccatacgggtagcatcggcaaaactggtgtcatgcgcagacatataggactgtaccaacacgccgtcattcagtttaagctgagaattgaaaccgatgatacgggtaggaggtaaaaaaagattttcttcttttacataggttgcgggagcgtagtgtgctacgaatccgccaaaattaggaacgattacgcaatcgttctctaacaacagagcctctatgtgttgtgctaattcaatcatagtgcaaaattaagagattaattgaatatatcccagaaaacttcgaaaaaatcactacttttgcatcgttttacttattactactaacgatgaactatatacagacagaaatagatggggtgtggctgatagaacccaatgtttattctgatgaacggggctactttatggaagcctttaagaaagaggagtttgaagcgaaaatcggtccggtagactttgtgcaggataatgaatcgaaatcgtcctttggcgtattgcggggactgcactatcagaagggtgaatacagccaggcaaagttagttcgcgttctgaaaggaaaggtgctggatgttgctgtcgatttgcgccggtcgtcaccgacttttggaaaacatgtcagcgcattgctcagtgaagaaaataaaaggcagttttttattccccgtggttttgctcatggctttgtggtgttgagcgaagaagctgtgttcatgtataaggtagacaataaatatgctccgcaagcggaagcgtctatagtatataatgatgaaacgttaggcatcgactggatgcttggggagtcgcagatgcttttgtcgcccaaggataaagagggcatggctttcagagatgctgtatattttgaataaactctaacaaacgatagatatgaaaatagcgattgtcggaaccggttatgttggtttggtaactggaacatgttttgctgaaattggcgtaaatgtaacttgtgtagatacgaatagcgagaaaatagaatctttgcagaaaggagtgattccgatctatgagaatggattggaagaaatggtacttcgcaatgtcaaggcaaaaagactgaaattcacgacttcgcttgagagttgcctggacgatgttgaggttatatttagtgctgtcggtacgcctccggacgaagatggcagtgctgatttgagttatgtgctggaagttgcccgcaccatcggtcgtaatatgaatcaatataaattggtagtgacgaagagcacggttcctgtaggtactgcgcgcagagttcgtgccgctatacaggaagaactggataaaagaggagtgaacattgagtttgatgtggcttccaatccggaatttctgaaagagggcaatgctatcagcgactttatgagtccggaccgtgtagtggtaggagtggagtctgttcgtgcggagaaactgatgtcgaaactctataagccgtttttattgaataacttccgtgttattttcatggatatcccatcggctgaaatgacgaaatatgcggctaactctatgttggcaacccgtatcagctttatgaatgacatcgcgaacttgtgtgaactggtaggtgccgacgtaaatatggtacgtagcggtatcggttctgatactcgtatcggacgcaagttcctatacccaggtatcggatatggtggctcttgttttcctaaagatgtgaaagcattgatcaagactgccgagcaaaacgggtatactatgcgtgtacttcgtgcggtggaagatgtgaatgaggcgcagaaaggagtcttgtttgaaaaactgatgaagcagtttaatggtgatttgagaggtaagaccatcgccttgtggggattggcttttaaaccggaaacggatgatatgcgtgaggctccgggattggtattgatcgataaacttctgaaagcaggttgtcagatacgcgcatatgatccggctgcaatgaatgagtgtaaacgtcgtatcggtgatgttatttattacgcccgcgatatgtatgatgcggtacttgatgctgatgtcctgatgttaattaccgaatggaaagaattccgtctgccttcatgggctgtcatcaaaaagactatgaatcagcaaattgtgctggatggacgcaatatctatgataaaaaagaaatggaagagctcggatttatttattcatgcattggtaaataagataattagagtatctttatacacaaaatttagacaaatgacgaaatatgtagcgatatcgttagtagcgatcttgctcgcagcatgtaacagcagtaagaatccgcactcttcctccggacaagaggaggatttgagtgcgaaagaactgctgcaaggaatctggctggatgatgagactgagagcccgttgatgcgtatagaaggggataccatctattatgcagattcgcagagcgctcctattacattcaaaatcatacgggatactctttatacttatggcaatgatactacctattataagatagataagcagggggagcatattttctggtttcattcgattgcagataatatgatcagattgcataaatctgaagatcctaatgattcgttatcttttgtcggtcaggaaatgattattcccacctatacggaagtaacgaagcgcgatagtattgtgaactataatggtagccgctatcgtgcttatgtgtatatcaatccatccaaaatgagggtgatcaagacgatatatactgaagacggtattagtatggataatgtgtactacgataatgtgatgcacatttgtgtgtatgaaggcaagaagagcctgtttgccagtgatattaccaagcagatgtttgaaagtgtggttcctgcggatttcctggtgcaggcaatcttatctgatactaaatttgtaaaggtagaccggaatggtttccattatcaggctgttttatccattccggaaagttctatttacagtatagcaaatttgactgtcagctttagcggcaagttgactattactccgacgaaatagccaagtgttttttagtttcttgcaggagaagaggggcggttattgcctttttttccattgttgttattcctttttcctccgaagcttcttcttttagaactgtcacctctcttattgttgtaagagcggggcttgtattccggtgcttctcctaattcggcgggaacgggaattttatatatttctttttcaagaaagttctcgatggatttgaagttgctctgttctttctcgctgataaaggtgagtgctactccgtcattgttggcacgtgctgtacgtccgatacggtgcacataatcctcgctgtcatgggggacatcaaagttgataaccaatcggatgtcgtcaatatcgataccacgagcaacgatatccgtagcaaccagaatattgattcttccggctttaaattcgtgcatgaccacttcacgttgtgcctgttcaagatccgaatgcatttctcctacattcagtttcatcattttcagagcctttgttacttctttaaccttgattttggaggaagcgaaaataatcacacgttcgggtacttcgtcagtaaaaaggctgcgtatgatacctagcttctgattctcgtaacatacataagctgcctgaatgattttatctgccggtcttgaaacggcaagtttgatttccgccggattattcagaattgtttttgccagttgctgtattttggcaggcatagttgccgagaacatgattgtctgtcgttctttcggcaaatatttcacgatttgcatgatatcttcgtagaatcccatatcaagcatacggtctgcttcgtccagtataaaataagaaaccttggaaagatctacgtatccaaggcttaaatgggctatcagccgtccgggagtagctattactacatctgcacctaacgtaagtcccttcttctgttgttcgaaaaggattccgtcatttccaccgtatacggcaacactcgatgcgggcataaaataggagaagccttccatttgctggtcgatttgctgcgccaattcccgggtaggggacataatgacacagttaatggcatcttcgggatgtcctccttcggataacttattcaggataggcagcaggaatgctgctgttttaccagtgcccgtttgtgcaactgctatcaaatctttaccttctagtatgattggaattgcttgttcctgtataggcgtgcactcgtcaaatcgcatggcgtcaagcgcatcaagcacatttgcatttagttttagttcggaaaacttcattacttctttttatttgccgacaaagataaaataatttttggtctcaattacatattcaaataagaatctttgaatcccaggaaatagagcactccgtcaagcccgatggtattgatggattgtttggcatttgccactactttgggctttgcgtggaaggcgattcccagtccggcgattcccagcataggaaggtcgttggcaccgtctccaacggctatcgtctgagcaatatcaaccttctctacctgagcgatcagacggaggagttcggcttttcgtttgccgtctactacgtctcccagatagcgtccggttaatttgccgtctacaatttccaattcgttcgcatatacgtaatctatgccgtatttcttttgcagatactgaccgaaataggtgaatcctccggaaagaatagcaattttgtatccatattttttcagtacatacatcaggcggtctactccttccgtaataggaaggctttctgctatttcctgcatgactgattcatccagtccttttaacaaggctacacgacgtgtgaagctttctgtaaagtctatttctccacgcatggcgctttctgtaatggcctttacttcatcgcctacacctgcacggatagccagctcgtcgattacctcagtttcgatcaaggtagaatccatatcgaaacagatcagacgacgcatacggcggtacatattatcttgctggaaagaaaagtccatctcctgttcgctagccagctgcatcagtcgctcctgcatggcgatacggtctttcggggtaccgcgtacggagaactcgatacaggcacgggtacgggtatccgttttgtcctcatccaaagggatacgccccgtcagacgtttgatggcatcaatgtttaagtcttgttctgctagtacgcgggtagcggcagagatctggcgggcggacagtttgcggcccaataccgtcagtatatagcggtttttcccctgcatacctacccagttctcatactgatcggttcctatcggttcgaaacgaatggttactcccaatgaagatgccttaaacagcagctccttcataatgaatccagaatgcctttcttcgcttctgaaaaggatgcctaacgacaaagtattatggatgtccgcctgtccgatatcaaggatagtagcgtcatacttggcaagtatttcagttacggaagcggtaagtcccgggcgatcttcgccggtaactcgaatcagaatcaattcagtatttgatggttgcataaaaaaatagactttaacgctgcaaaagtagggaaaaaagttcgtttttatgctaaataacataaaaagttataccccaaaagtaagaaaatggcttgtttttttggaagttaatttaataattacttacctttgcacccggtttcaaaattaaaggcactgataatcagcggattcctcttcgcctgatgcctgaaaagacaacgtttcgggaagaaaccactgtttaaggacagtcccggatagtattaactaaaaccgcattacatgaattcttatgtaaaatggatttttgttgtattactgatttgttccttgaccgctttcgttgagaaagacaaacctaccggaggtttgagtgagggtgacgtagcccctgattttaaaatcgaatctgcgtcgaatgggcaaccggcatttaagttgggtaatttgaaaggtaaatatgtgttgcttagtttttgggcaagttatgacgcgcaatcccggatgcaaaacgtaagtttgagcaatgtgcttcgttcttcccgtaatgtggaaatggtttctgtttcgtttgacgaataccagtcaatctttaaggaaaccgttcgtaaggaccaaatagttacgcccacttgtttcgtggaaacagaaggcgaggactccggattatttaaaaagtaccgtttgaatcgggggttcacaaactatttattggatggaaatggtgtgattatagccaaaaacatctctgctgcagatctttctgcttatgtaagtgagattggttgacaatctcgaaaagagtaaggagaaagagggattttccggatcaccgtttggtgattaaaatggagaatagacaaaagaggaaatggatacaacaaaaaagttccgcctgtacttgctttcggcaagaataggcggaacttctattttttatctcctgaatctaagttttatgtttccttatttaggtgctttctgatacagatagaatgcgatgcctgcatagaggatattgggaatccagactgcaatcgcaggaggcacgttaccgtttatggcaaaggtagaagtgattgtctggaacaggatataagagaagctaagccctaatccaatacccagatgaagtcccataccacccttcgtttttcgtgatgaaagagaaaccccgatgattgtcagaataaacgaagcaaatgacattgcaattcgtttgtggtactcaatttcaaactctttgatattggcaaatccccgtcgtttctgcttttctatatattcgctcagttccggactggtcagcatctcctgttgattcttcatgatcaggaagtccgatgggtccatatttataatagagtcgatccggtctcctttggtgatcttttcttttagtccgtccagttcacgtaccatatagtcgtgaatggtccatttattgaccgttgttgtatcgtaagtgatacggcgtgccgttaagtgggagacaagtttcttgtcgacaaacttatccaatgaaaagcggttgccggttttcattccgtcattgtaattatcgatataggctatgacaccactgtccacttccaactgcacgtttcggaccgagttgactttcttgggtttgatgtatttatcttcaaagttcagacgggtaacactacctttgggaatgatgaacgaactcatcatgaatgttgttgcagcaatgatggcggcagagatcatataggggcgcatcattcttttgaaactcataccggtggagaacatggcaatgatctcagagttctccgccagtttggaggtaaagaagataacggcgatgaatacgaacagcggactgaacagattggagaagtaggggatgaagttcatgtagtattcaaagatgatcttgtcccaaggggcttcatgctccatcagcttgtccatcttctcgttgaagtcgaataccaccgcaattgagataatcaatgcaatggcaaatacgtatgtccccaagaatttcttgatgatataccaatccagccgttttattaatcgattgcttttcattctttataatcttgttgacactctttttaccatcatcggcttccaggtagagaaatctccggcaatgatatgtttccgggcttcacctaccagccacaggtaaaatgccagattgtgtatagaagcaatttgcattgccagtagttcttgtgcgtggaaaaggtgacgcaagtacgctttgctgtatagcgtgtctacagcagaagcaccgtctgcctcgatgggagagaagtctgtttcccatttcttgtttcgcatattgatgataccgtctttggtaaacagcatgccatttcgtccgtttcgggtaggcataacacagtcgaacatatcgactccgcgttcaatgccttcaaggatatttacgggggtaccgactcccatcagatagcggggcttgtctttgggaagaatctcgttgacaacctctatcatctcgtacatcttatctaccggttcgcctacggccagtccgccgattgcatttccatccgctcctttggaggcgacgaattcagcggattgcttacgcaaatcctgataaacacatccttgcacgatggggaagagagactggttgtagccgtatttcggttcagtttcgttaaaacgctgaatacaacgatcaagccatctgtgtgtcagccctaatgactttttggcatatgcataatctgaatctcccggaggacattcgtcaaaagccatcatgatatcagcgccaatggtacgttctatatccatcaccttttccggggtaaagatatgtttgctgccatcaatgtgcgagcggaattcggctccttcttcccgaagttttcgtattcctgctaatgagaatacctgaaaaccaccgctatcggtcagcataggacgatcaaaaccattgaagcgatgcagtccgcctgccttttcaattacgtctagtcccggacgcaagtataaatgataggtgttgcccagaataatctgtgcctggatatcttctttcagttctgttacatgtactcctttaacagtgcccagtgttcccacaggcatgaagataggtgtttgtatctgcccgtggtctgttgttatcagacctgcacgggcattacttttagtgtctgtatattgtaactcaaatgtcattcctggctgggtttctttacagataaatcaatggcatccgcaactttctcgtttgtcaaggcgattgcgaatacttctttaatgtcgtttacatagtggaattgcagtccttttaaatatatgtcctgaatttcatctatgttctttttattttcggcactcatgatgatttctttgattccggcacgtttggcggcaagaatcttctctttgataccaccgacaggaagcactttgccacggagagtgatttctcccgtcatggcaaggtttgcttttacctttctttgggtgagggcagaagctaaagaagtagccatagtaatacctgccgacggtccatctttcggaatagcaccttcggggacatggatatgtatattccagttgtcaaagatgtcttcattcagatcgaggatggaagcatgtgctttgatgtattcgagtgccagcatagctgattctttcattacatctcccaaattacctgttagtgtaagacgcgcacctttaccacggctcagactcgtttctacaaagagtatttcaccgccgacggcagtccatgccagtccggtgactacgcctgcatagtcatttccctgatatttgtcacgagtatactccggtgctcccaggaattcatacaaatcagtcggtttaatttctgatttggcgaaataaccgtctgttgcatattgacgggcagatttgcggagaatcttgccgattttcttttccagttcacggacgccgctttcacgggtatatgattcgataatcgcttccaaagtatctttcggaatcttgatatccgtctttttaagtccgtttgcttccagttctttcggcaacaggtgcttacgggcaatttcaactttttcttccgtgatgtatccgctgacttcaatcagctccatacggtcgagcaacgggccggggatcgtattcagattattggcggttgcaatgaacagtactttggaaaggtcataatctacatccaggaagttatcatggaaagaggtattctgttccggatcaagtacttccagcaaagctgatgacggatcgccttgacggtcggcactgactttgtcgatctcatccagtataaatacaggattagaggctcctgccttaatcagactcttgatgattcgtccgggcatagcgccaatataagttttgcggtgaccgcgaatttctgcttcatcgtgcacaccacccaaagacatacggacatattttcgtttcagtgccgatgcgatggattttccgagggatgttttaccaactcccggagggccgtacaaacagataataggtgatttcatatcgcctttcagttttaatacggcaaggtgttccagaatacgttcttttactttttccagtccgtagtggtctttattcaacgtcttttctgcatttttcaaattcagattgtctgttgtataaacaccccaaggcaggttgagcattgtttgcagatagttgagttgtacgctgaagtccggtgattgcggatgtgtacgttccagtttcgccagttccttcaggaaagtatctcttacttctgcattccagtgcattttaactgctttcaggcgcatttcttcaatttcctgctcctgaccgctgccacccagttcatcctggatcgttttgatctgttgttggaggaagtattcacgctgttgctgatcgatatcctcacgggcacgcatttggatggatgccttgatttctgccagctgtacttcgcgattcaagatttccaatagatgataagtacgctctcttaatgagttgatacttaataaatccatcttctcatctttcttgaatggcaggttggcacaaatgaaattaatgaggaacatcggattactgatgttttttatagcaaatgacgagtcctgatgcatttctgatgatttgatataacgcatcgtcaagtccttgcatgtttcaaccagggcttgaaactctttatcgtctttgtttgggacatcttcttccaaaagttcgacctcgcccttcagataagggtgtgtatctacaatatctttcagacgcagacgtttcattccctgaaggatgactgttgttgtctggtcaggcatttccagtacccgtacaattcgtccgacagtgccgacattgtgcaaatcttccagtttggggtcttccgtgtgtgccgatctctggcaaatcactgcaatatctttgtgtttcttttcagcttcgcgaaccagctttaatgaagcctttctgcctactgtaataggtaaaaatactccgggaaacaacaccatattacgaagggggagaaccggaagaatatcaccggattttatattcacatcaaacacatgttcgtcattgccatcatagtcggtaatcagtgagaagccgttctcaccaacttcttcttccaataagtatctttctttcatcttttcgttttaatttagtttatgtcatacataatatgcataaatcgtttgcaaagttaattgattctctttaataataaagcacagtgtggaataaaaacacaaaaacaatgccaaaatatcgggcgttaatggatttattccataataattatttatttttgacggttttcggcaaagatcagtaaaaaacaggtttagatggctaataagatggcgaatcctttctttcagtttaagcagtttacagtatggcatgacaaatgtgccatgaaggtaggtacggatggggtacttttaggggcgtgggcttctgttcaaggggcacatcgaattttagatattggaaccgggacggggttggttgctttgatgctggctcaacgtagtctgccggatgcaaatattgtggcgctggaaattgacgaagccgctgccgggcaggctaaggaaaatgtggcccgttctccctggaaggatcggatagaagtggtgaagcaagattttctgttctatcagtctccggataaatttgatgtgatcgtttccaatcctccttactttgtggattcgcttagttgtccggaccaacagagaagcatggcacgacataacgattctctgacttatgaaaagttgctgaagggtgtggctgatttattgaagaaagagggtacttttacaatcgtaataccgacagacgtggctgacagggtgaagactgcagcttccgaatatcatttatatgcaactcgccagctaaatgtaataaccaagccgggaggaactcctaaacggatgttaattacttttacgtttaataatgagggatgtattaaggaggaactgttgactgaagtagcccgtcatcaatatagtgaagagtataaagaattgactcgtgaatactatttgcatttgaaataatatttttgcataaacaaaaaaaagagctacttaatgtaactcttttttttcgtcggggtagcgggattcgaacccacgaccccctgctcccaaagcggcgtgataataaaggatattcagctacatatcagttaattataatgatgcgagctaaccatttcaaagatagttcaaagaacgctattttgagggctttattttagccctttctaactcatgattcaataaagcaatttcttgcttttgggcgctgttttctcgcagtactttccggagctgttgccggagagcaacgattgttttgtctttatcttccatatatttatttgttggtttatccggttattttttgtcgtccggctacttgcactttcttgttttctttattatctatacaaggaaaaacaataggtatactaaatcttatatttgtagctgacttagcttgtccttcaattttggtattactaccgaatccccaagcaccaaaagtaactccaaagccaacttttccaccttcaccggacatattagccaatgatacctcgaattcaatattctgaacactgtataattttccttctatttctacattgttcttactgttacttttccgaggacttacaatagccccactggtttcaactcttttttgagcagctgttataccatcaacgatttgggaaattgcttcctctacaaactccttgagttctattacctttggggtattctctggttccatttatattttaaattaaaagttatgtttaaaaagttactttacaattatcgtatgcgtaaactacgcaaatattatattgattatacaatgaaacattcatctaattccattaatgcattttgctatgaacgagatgacggtgggctagatgaggttgccattaggtatattgaaaatatatgtaattatattgtaaaaggtatccaataggatgccttttagtgtattctacattttcaattaactggacttcatgatgttatatgatcattgtttctcatagaatagcagtccgacacgatctatatgctcgccaaaaggagtacctatattcttactgtaatcaactatatctactttgtatagtaatcccaagtcctctatttgaatatttatatccaacagttcattgaaagatatattttgccctataagggccaaatcaatatctgatccttcggtatagttgcctttagctctagagccaaatattaataccttgtcaatattgggatgtttttttaatacatcactaatatcttttataacttcattacttaaaccaaacatattatgcgaataatcctgtgatttcacttctttcataaccaagccgaacagctaattgttttagcagtatagaatactcagtgtaaatcttttcgactatctcacttgctttgccatcattgtatgtatgcgatgttatatttctagccttcgacattctacgccaagcatcatgatctgatattaaaccatcttcaaatgatttctgtaatacaggatttggacctgttatatccttatatcctttatactctaagaaatcctgcaaaactttccaagccaactcgaaagtatattcaaatctttgtacaagaccttccatttccagttcggttaactcatagggttttctttcggattccgtaaccagtaatactcttttgcatgccttgcaataactatcatatctttgtaaccaacgtatatcttgttccatagttgctaaattatagatcaattatttgagtttgatttctcccttttttaaaatcatcatcccattctatttttattgtaaaatgtggccttcttcgaaacaatatgtatcgcacttcaaaagattgttggggaaggagtattggataaggtaaataattgtctggcatatttaatgatatgttctcctcaggatcatcaagaattgcaaaatttacattatatgccttcgcttgtcctttgttgtaaatttttaaaatattcatttctcctttgctggttttaataacattgcactcaatagaagctttttgactttcttcttcttctgttcttcttttttctatttcttttttctttataatcaaatccaatttatggattttcctacctgtataccaagaataaataagtgctaatgctgcaattataaaactgcctaatgaaatccaatctgaaatttccatcttgattatattttatataaaacttaatattatgaatattttaatttgcatattttctgtttccatttccattggatcagtgtttattaatctaaaaaatatcaatcgtttaaataatcttgaaaaagagatagctaagcttttaaataaaaagtaatcactttcttttgaatatagaaatgagttgattccgtatatcagatgttatttcctctttaatagtatctatttcttgggtgatataagcttgattgagttctactagttcatcatagccaccaaaatattcacgattacatttggtacatttgatataacttttattatcattgcattcaaatgaagagtcgtcaccacaagttatgcaatgtaattttattgatttattataattcttatccatggctaattttatgtttgtaatactatagaattttatttgttatgaccccttttacaaggaatactcgaagaactttagtcttgtctattatcatctcgtcaaattcttccaagttctttggaactaaacgccatttattaggattgtccttgcagttacggatatatttcacagttctgtattcgtctgttataataaggtatgcctcaccaggaagaacactatctaaactgacttccttaatagctataatagaaccatcatttatgtctggaatcatagaacgtccataagctggtaccgcacaatcacaattctgaaatgccggtatatgcaaatagtaattaggaatattagtctgatcgttgggaagttcatcatatcccatagtaacatcaacgtcaaaataaggtattcctttggatgattgtttgcttggtgcaggcatttcagaggaaatagaagtgatagatttcgcagaagaatttagtttatttccgtcgccagtcaatagccaggttgtattcaaatctgggtagattgtagatattttctctaaattgttccgtcttatagagtctcctgtgtttcggacaaatccattgcttaaaccacaattctgctcgaacattcttgtgcttatgcctaattcgtttatgaattggagtagcctatctctaactgtttctttcattaaatcctaaattttcttaatgtatagattatttctctatgcaaatatctacatgtgtagattttaattctatatttgcactataaagttaacgcaaaacaatgataacgccaaaataaaagggcaataaagttaacaaaatagattatttactctaaatcgatatatagatatggtaaagacagaaaaaataaaattagtggtttacaaagaacatacgcttgggtatattctaccagaattgcctgattcagttcaaatactacattcttcacctctgaaaggagctattggtacaaccaatttgcagaacaatttccagatcaacaatccgaatgaaatcagactagcaagcgagagtgattttgatgcgtttggaatttcgtttgatggatataaaaattcacctgattacatttataaataaaaagaaaatgaagacaattctagaagtttcattacaagaagcaagtaaggcaaaggatgcaattagatatagtttgctgcgtacagaactgaaccaaacaagtaccaatgtttgggaactaccaacttatgatatgaatgatggatatgagtgtgatggtgacgaagaactgaaagatgaaattcgtgaactgttttcttctttcggaattgcagaagaagagtattcattcactgacaaagaaacggaagaataagctatataatcccggacgggtttgaccgcctttccgggaactagaaactataaatataataatgtatatggaaaatcaattagaaactatcaaagcaaatctgccttacggatacgaaaagcagatagcgaaagaagtaggatgctcacagggtacagtgcacaatatccttaataataagccggcttctgctcgctcaacctacaaagcaaaagtattgaatgtcgctgtaagaatggctaatgaagccttggaagctactaaaggagtctccaaagctgctgccgaactagagactttgcatcatggaactgcaagctgacgctaaactaacgaagcgcgaaaatcagattgctggcctcgctttttgtggtaaagcaaagaaagagattgcggatctcttgaatattgcatacgggacggtaaacgtaatactggatagagcttacaaaaagacaggaacaagtaaactgaatgaattaggcagttggtgggctaatagagcatttgctctaaatattgatttccagcaattgcagaaaacgatcgtagctctttcgtttcttggaattattgcctttcagattgcatttgactgcaacaacgatcttaaccggagtcgacgggcaagaatacgaagaaataaaatagaagaagtatatgaactctaatcaatattaatcaggcagcatagcatagagatgcagatgtgtttcagtaataaaatcagctcaacaccattcaaaagtataggaaacagcctaattagagattatggaaaattgcttcgaaatgatggtcgcccgatgcattaaaattgggacggtgcaaacgcttacgatgctgggactactccccgaagtagtaacaatatcacaagcggaagaaatatacggaaaacgcctaataaaagagtggcgcgaaaaagcctggattaagttttatccggcaaataataaggaaagaggaaaatattatgtgaaacgatccgaattggaaacagccagtgcaatgatggatttgcataataaagttccagataacattatcaaacaactaatgcagatcgctgtatgagatatataccgaaatcatcagaagtattacaggctctgcaagatagtatcggaaagcagattgcagaaagagaagaacagaaaaagaactatgttcctactcctgtagagattaaacctgataaaaaagatataagcatagagcccacggccgaagatattcttttaatggaggaatatagacgtggagtatatcaaggagattaataaaatgctaatatttaaacaattatgagtaaaattattgaagtaaaagtggaagagctaaatgcgcttccagcaacgaaaattgtcgaaagtgaaaatgtacaggcaaaattcgttcaaatgtacaatgctatctggggaacagataaaggtgagcaaatgtatcataaagaagtattcaactttcaaaaacttctccgtgataatcctgatttggcagattcgacaaagatgtctctatatggctgttttcttgatatagcagtcaacggtcttacattagatcaaacaggacatccactttgctatatacttagcagaagcagtaaaaccggacacaagaacgcacaaggatatgatatttatgaaaaacgtgcctatgtttcagttacagggtatggcgaactgacaatgcgtatgcgtgccgggcaaatcaagtatgcggataatccagtcgttgtatatgagggagatcattttaaagcatccttagttaatggtataaagaatatcgagtatgaagcacaatgcccccgtacttcaaccaaagttattgctgcattcattcgtattgtacgaaatgacaactcggtagattatcaatggttaatggaaggtgatatcgaacgattgaaacattatagtgaaaaagcaaattcgaagtggaacgatcaaactaaaagacgtgaattgggtaaagccaatgcactttatacttcgaataatggaagcattgaccctgggttccttgagaataagatgatcaaacatgcgtttgatgcttatcctaaggttcgtacaggtaagtttactataatggcttctgatcaagaagaggaagaaattatcgactatggcttggtggatgaagacaaggttaatgaacccgttcaggctgtggataatcctaatattcctttcggtgaagaaaaacaactggaagctccagaacctgtacaggtgccagtctccgatgatgatgaagacggtggattctaatacttactaaccgattaaaataaataatatggcaacagagttaatcaaaatagacgaagcaaaaaatattctgtcatcttttccagatataatggggaagaatacaaattctgtcaaaaagtgtaatgaagctgggcaagctctccttgacactatcgaaggagaaggtatgaatgaaacaatagatcaggctacagccgactacttgaaaaaggttagcgtaacactcaaaaatatggatgaacgtcgtaaacctattacgcagatatttgatagaatacgttcctttttcacctcccaagaaaaacaaattgatcctaaggatccttcaacaattcccggaaagcttgtgataaagcgcaatgagtatgccaagtttaaatacgaagaagaacagaaaagaaagagagaagcggaacagagagctagaattgaaacagagaaagcgaactatcgacagataataggggatagccttctttcttatttcaatcaatatctttcaagtaaagtttctgaattgcagggaatattttccaacttgacttatgaaaacttcgatcgtgaagttataggaatcacagtttttcagaccgattatcccaaatctcattttgataagtttagtgcggattctgcaacttactatattagtcaagaaacaaaacaggagattcgccgagaagttctagagggcaaatatgagcaatacgctcaacagtataaggcaaagattgtaagcgttaagcaagaccttaccgaccgtgttccctctaaacgcaaggaacttgcagaactggaacaacttcgtctcgctaatgcagaggaagctgccaaagcggaagaattgcgtaaacaacgtgaaaaagaagctgcagccaaaagaatggaagagttgaaaaaggaggaagaagcagcaaaacaagaggctgcactgaaggcacaacaaagctctattggtagtctttttatggaagctgccgcttctattgctcctccaccgactaacgccaaggtgaaagaaaagattgttgtacttcatcagcagggatatttagaaatattccagatgtggtggataaacgaaggtcaaacgttgcctgttgaagaactggagaaaatctttaaaaagatgattacttattgcgagaagcaggcgaacggtaaagatcaaaagcatatcgaatcaaaattcatccgatatgaagcagatgtaaaagccaaatagccatgtcaaatcctgattcatattactctcgtccggaggtcagcaattcagatctgacagagcttaagaactatctttatccccgtgctcaatacggggataaagagaaagcattcaagtttggaactcttgtagatgctcttattacagaaaacgagcgtgtaagatatgacaagttaatggtagacgattacgtgtatacgaaagacgaatttgaactagggcttgaaatgcgtaaggctctccggaaagaagcagaaaaggatcaatttctagctgtcgttttagcacagtccgatacacaaaagtttatggttaataaacaacaagagttcttttatgggaactttgtttatcatctcgatacacggtgtaaatgggattggtggttgtcttctttcaactttggaggtgatttaaaaacgaccttcgcagagtcccaaacacaatttgatgaagcgatagatttctttgactgggaccggtcccgggcatggtatatggatatagccggtagcaaacaagattttatttatgctatcagcaagaagaattgtagaatcttcaagcattttattaccgaccggaaacacccttcatacatcagaggaaaagagaaatacgaggaccttgcttttaagtggtggcaattaatggtctgattatattttaccataaaacaatatgaatttacttattacatcaaaagaacaaatattggccgaattaaccaatatagattcattccttaatataactatgagcgaagatgtagcagaagctgtacaacgcggtaatgacttagctgtatatgttgctcgttccggcaaattgctcgcagattcaaaatattggctcaatgaggcaatgaaatccgaggtcatgcagacgcttgtagacacggcaaaaagtgcgaaagcaacagcgacagcgataaatgctctagtcaattctttatgtcgggaagagagatacttagttgattggtgcgaacgttgcaatcggacggcaacacatcaattatcgtggtgtgtaactgtaataagtaaagctaaggcagaaatgcaaatgtccggaatgtataacaacaaaaagtaattatcatgaaaaatctaagaagagtcacaatcggaatatccgttatcggcctgtttacggcattatctttctctcaaagagaagatgctacaactagagaaataactacggctgccgtaatgggagttgtatcaacgtttagtattatcactttatcaactaaagaagattatggaacaagcaaaaaatgaaatcaagaaagcgattattaaaaaggaccgcttgaatgtagtgtacaatgaacgtttttcggaagcaaactacacgaatgtaattagcaagaactgcgatcagatcattcatagtgacttaagagagacatttaatcgtctcaaattacatcttgtcgtattatgcgaacagccggaagctgccaatattaataaggatagttttacgtctcctggctattcagagattcttgaaaattacatcataaccggctatgcaaacgatagcgtcgatggtgtgtctggaattactattatgggggctaaattacttcagtccggcaaagttgttgatctgaaaatcttcgttcctctccttgatgcagactatccttactatgaagaattgagcattgatgcggcagcttgtgacgcagaagttgagagttatctgtttgaagagaaatggggagtcagacaggaacgtcttgattttgatacagacgaaccggaagaagccgttataattgaagataaacctaaaaaaagagggcgaaagaagcaaatagaagctccagctcctttagatgcaactgcataacaccaatcactatagggggataattccccctacaaaatactctaaatcatgaatatcgaattaaaaggagataattttgaattatctttcaagtataaaccttctatcgtagatcggatcaggcagattcctggaagacgttttgacggtacccgaaaagtttggattattccgactaggagtagagttgatcttgaaaggatgatttatcaaatacagcaatttgagaatataaactggcttagtggcaatgaaaaaagggaagaagaagctgtttacgatattccggaacttccggagctggtcattcctcataatcttaaaattcaaccttatccttatcaacttaaaggcattgctcgaggattagaattaaaacggtttatgaactgtgatgaaccgggactcggtaagacattgcagagtattgcaacaattaatatcgctggtgcttttccttgtcttgttatttgtccttcttcattaaaaataaactggatgcgtgaatgggagaagtttacggacaaaaaagcaatgatcttaactgataaagtacgtgatacttggacttttttctttcaaacaggaatgcatcaggtatttatagtcaattatgagtctttaaaaaagtactttgtacaacgtataaagaagtccgaaggctggacgctacgagatgtagaatttagaaactcaatcaacttattcaaatcagttatcattgatgagagtcatcgttgtaaatctgcatctacccagcaggctaaattctgtaaagggatatgcaccggcaaagaatggattatcgaattgacgggaaccccagttgtcaacaggccaaaagacctgattccacagctagcaatattgaatcgtatggaagattttggaggttataagccttttgttaaccgatactgttcaggtcaaagagaagcgtcaaatttgaaagaattaaatttcaacctatggaaatactgtatgtttcgacgtgaaaagtcactagttcttacagatcttccagataaaatacgtcaagtaaacacatgtgaaattactaatcgtaaggagtacgtagatgccgaacgtgatcttattatgtatctacagaaatataaagatgccgatgatgaaaagattgaaaaggctttgcgtggtgaagtcatggtacgtatcaatattcttcggcagatctccgcacgtggaaaagtacgcgatgttattgaatttgtgaaagacttccgggagaatggaaagaaaataatcctcttttgttctcttcatgaggttgtagaccaactgaaacgttactttcccactgctgtatcagttaccggaagagattcccaagatgataagcaaagagcggttgatgccttccagaataatcctaagacagatataattatttgctctattaaagcggctggagttggcttaacgcttactgcatcaagcaatgtcgcttttgttgagttcccttggacatacgctgattgttgtcagtgcgaagaccgggcacaccgtatcgggcaaaaggactctgttacctgttactactttcttggtcggcgaactattgatgaaaaagtttatcgcataattcaagagaagaaaaatatcgctaatgcagtaaccggatctacggaagacattgaggaaaatatcgttgatatggttgcacgaatatttgatacagattatgatgatgaggggttttaaaatggagccacaacagaaaatagaccggttaaagaaagcgggctaccaagttcaagagaaaggtaacaagattcgtgttaccaaaggatcattaataatcaatggaacaattaaccaagtacacaaagaagtttttaatcaataattataggcactatgaatacgtatagtaaatatgtaccaaatgtttttcttgcaaaatgtagtgaaaaacatgaaaaaggagaagtaatcgaggttacaaccaagtatggaaaagaaaatgaatgtattgttttcaacctcatttacgaacgtgatggattctattattactcaatcgtacgggctgatggctttaatgtgcaagagtgggctaaacaaagggctgaacgtcgtcatgaatgggctatatctgctgtacagaaaagtagtgaatattacaacaagtccaataaagataaggattttctttctctaggtgaacctatcaaagtgggacatcatagcgagaagcgacacagaaaagcgatagatgatgcatggaacaatatgggtaaaagtgttcagtttgacgaaaaagcagccgagcacgaaaggatagctaaatattgggaacaacgtgcaaatacaatcaatttatccatgccggagagtattgatttctacgagcataaacttgaagttgctcaaaaatatcacgaagccgttaaatcgggaaagtgcccgcgtagtcattcttatgctcttacttatgcaaagaaagaagtaaatgaattacaaaagaaatacgaactcgcaaagacactgtggggagatgtttaatctagtagccttcgggctactataattcaagcctgattagatatgaatgattataaagataaatatggatatacaactcgtaggaaaatagaagttccccaaagagagttgactattcgaggacataaggtatctgatattaaaagagaagatattgaaaatttctgtaaagcaagagccatttcacctgaatggttggtgagtgagcttatcaaagaaattgattaatgtataacaataaaagaaaaaataaactatgcagtacatattgactgaagaagaatacaaaaaactaactcctcttagaaatgtagaagagctggaaggaaaaatacagctacttaatgataaggtaatgatacttagtaatcatccatgtagtaatgaaaaagaaaggataattgtttcattttattgtgatgattgtcctataggtgcatttggaaccaatacgtgtaaaaagtatcaacgatattctaaatgagaaattagaaatgaaacaaagcagaatgtgtacagtaagtcacggaaattgcttaagaagtccaaaccttcggggaggtagtttaaaggctatcttgctatgcagcacctcttctgctttgtttttaattagaaatgaacgaactcaccaatagacagaaacttattatacaaggcaaaatttgtccgtattgtggaaaagatacagaatttatggatagttccattgtatatggcaaatcttacggtatgatttatatctgccgtacctgcaatgcttatgttggtgtacataaaggaaccgatcaggctttaggcagattagccaacaaacagctccgagtgctcaaacatgaagcacacgaatatttcgataagatatggcgattcaagttaatgaagcgaacagaagcttatacatggctctcgtctgtattagaacttccagaagaatatacacatatcggaatgttctctgaaaaaacctgtagacaagttatatatgttagtaaacagttactgcaaaaatatggaatcgaatctaagacaccttattgcgaaaatgactaaagaaaagtgcattttatgcggaaaagaaacggtatcggttattaaaaccggtaccgtctttatgtgttataattgttatgcagatcagcgtaatcctacgcgctctaaagaagtacataataacgaggaagctcgaatacaaacagagttctttaaacttattcctctatatttccctaatatacctgacaaacttatatttgccgttccgaacggtggaagccgtcatatacgtgaagctgctaacctgaaacgtcaaggagtaaagcctggtgtttctgatgtgatcgtacttattcccaaaaagggttttgcttctctctgtatagagtttaaaacgaaggtggggaaacaatcagaatatcaaaaagagtttcaaaaacaggctgaaagttgccgaaataaatacgttatagtccgaagtgcattacaagcaattgaagaactacgaaaatatctttcttaatagaattgaaatttgtaatactgaaattccacagattgaaatagcttttatgtgataggggagagggcagctattttttatatctttgctctaaaaatacaagtatgacatttgaagaagcagtatcattagctgataggataaaagagcaagttatcggtgtacctgttaaaggccgcttgattgaatctttgttcattgggcctacaaactggaatgaaatgcatgtttttatgaatatctgtcttcaaaaaggggaagatgaagctatcgacgagtttattggaaaaagtttctctgtgtatggtaggtctgtaacctatattaatccggatcttcctcggtgggatgtaatagtgttggatgactgggagaaaactatttataattgaaagaggtagcttatttggctacctctttttttactggtaccaaaggagagcaactttctcggtttacaactatatcacgcatattaggcttattattaaaattacgagatatattctttacaatatcagtatagttatcagaacatctctcaaggttatcagaatttcccttatactgataataaaataccttaattgataaacaattatcatgttcaaataaagtatttaatagagttctatcagaatttccacaagaatgtcccattacaaatacctgatatggtcctaatgctataaatttcaataattctctatagttctttgtttgatgatattttatagacttaatattttctagaaaatcattattttgtaatccttctatttttctataatcatcatccaattcatcgccatatccaaagataatgggattattttcattatctaattccccatggatattgattatttcattagggttatcacttgcatataatttttctgcggtgtttgtataattaaagttgagaattaatgtgcttggtataaaatacttctctttaaaagatttcttattgatatgtttttttatgaatagcatttgttcttcctcttttgtcatacataaattgtattgagggtcattttctttatcatgtcggaagtctatatcatctcctgaatagaacatctctgaaaaaatagaatcaacgaatgccgtttgtttacaagtcgcaatttcatcaaattctacaaaactcgaaaaagcttcttggattgactggtgtatacttatttctgtatttttagtaactttggtcaagtactcctctaatagtcttttaacatcatcaaattctttgtttaatgtccgaatgctttcactttgtttttgaggatttctttcttgaagtagttctttcaatgcattataatattcattttctatatctacccaattaatgagggaacattgacgagatatacgttcaaaaaaacgatttttgaactttaaatgaactgtcactgatgtattagggacactattatactcattgattaatgtacatagttttccaaaaggactattttcattatatgaaaaacaaactttattggtttcagttttaccacactctttttcaatacacacaaaattatctttgtaattttcagggatgtgtttggaccctccataatgctggtctaaccactgccagtatctaccatatacctgttcttcaacaactgcccaatagtcattaataaaatccttatatccggtctttaaattgtgagctaaatcaaaaccattaccaataattataattctattcatactggagacttatttaagttaataacaaaaatatcataattctagaacgaagttatgatcgcatttattttccatattatatttttaaacattcaatattcttcttgtttacaaaatcttcaaactcacctttcaattccctactcaattttaattcgctattccaaagaggtaatcttttattttgtataacagactccaatattaaacagtattctactagtaacggattgtcattttctgtattataccaacatatttccaattcgcagatagatagcgcacgcattttttcaggccacagtttccatctaggagtcttttgctgcttcccaattattcgtctttttagtcctcctttgcgatgcactgtctttccattttctatatgccctgaacttccgatataaactggaaccttcgtccctttaaaatagccatatacaatatacactccacaacaatcatcaggaatttgagccttctcacattctctattcaaattgtcattaattgtgaattttaaacatccctgtttattatagcgatttaataaatcaaacatacctttccaaatgtttttttattatttttgccatctcctttaacatatcatcctttacatccgcacttagctgacgagtgtggattacaagttttctaccactggcatcatgatgagtataaaaccaattccctttattaaacaaaaatctaccgacatcatcaccatcataagtgacaccaaaaatcttatctatctcgcgaatattgtcattattctgaatataattagaacatgctaatataatcacaggaaaactttgaataaaggaggatacctggaataattctttccgtgaggaaattccacttttatcggcttgagcagttcggagactaggggtatcatttatctcggtagtaaatatttgagttgggaaatcaacataccgattgtgaaacccttcgctgccatagatataatcttttaatctctggtacttgctccaagtatttacaccccacccctttgctacgttaacatcttgttctactttatgacataactccataattgtatcattactaacatgattatcccacatagatgcattgctgttataagactcatcaggttcttccattgcagactctttacccactattagtattttagagttagggtttccccaaccaacatatttgccattttgattacagtaatttacaaattccttaaattcatctaagtattccatagtatatcaattttatttggacaaatatatatgattattttatatacgacaaataataattaaaaagccccgactacacttagtcgaggctcattcctattggagtaaataatgcagtatcagaaccttttcataggttagtgttaaaaatcctttaatcaacatttatcagtcaacgatgtcgcaaaaaagctcaactaagaacaatattattgataatttcttatcttcgataaatgaacacctcgtattcgttttgcaaattctgtagctatctgtatgttttcataacttcttgaaatattgaaagttatatcacatcccaaataagattccaacttatcttcaatagaaacaaacacaaaaatagaacaaccatttacagtcatttttgccttttcacctgctttatcccattccagttttttctctaacatactataaagattaatatcggaaagaatctttacatcatttatatttctaaaatgtgccataattctattttactcaataattctagtagactttagtaagccaataaatggagtttgctttctgtcaatatacggtttgacattttgggtattgatacattccatatcacggacttgcctaaatgcggaaataaattgattcttattgatagtctctccttcagtggctctaacacttccttcccttccacctttgtattctatagaatcaattatgaccttggcgttatatttaataccagtagaggataaaaactgcttgttcttattaatataagctactactacattccaaacctcattggccggcattcttgcatattcatgtttgactttcattatggatctttttttgcaaagatatgaaaagttcaaatatacaatgcaagtagggtaaaataaaaaacgaatcagagagacggggcaatggattatgacgacaagcgacttacaataataatttgttcaaaacaatctattttgtacaggagctgttatatgctctataaattccaagattttatatcccttattttcataagctttatattcaggattgtatttttttataattttcatttttacctttattgagtccccttttgcgaatcttgcgccactatctatatgcttcatgagggcatcatcttttactattatagatattttaaatccattatacagaaactgccatgtagctcccttttcgaaagacaatttagttattaccaatatagcatcaacaacttcttcatcctcatttggaatttccttttctgtatcgaaatccgaataaataagttctttgaagtcttttctttcaaaatgaataggtttcatcttatcgacagaaatagtcatcccctctacattagcatcttcatctgccgtttcaatggatttactgatagcctctcttacaataggttgattatacacattgattattgtatctccaattgtattattattcccctctattttgatttctaatttagctgtatctttctcttcttcactttttataggcttacctttaaaatagctatatgccgagaaaacacctccagcaacagataccaaatccgataaatagccaacgcttccagaagaaaagatggatgctataacgttctccaataatgctatatcaataacaaaagatcccttctctatcgcattaactttgactgatacacttcttgctcctccaccaagttccttattagcttctgcaataattgtattataatgaataagcgcgttgatcagtgtattagaatcaatctgatgttcttgaccttcaaacttaatttgcattgtttcctttttcatcggtatttttatttttgcaaagaaatgtaaaaaaaatgatctagccataataagagggtatgttttataatatatttatattataacaatatacaaggaaacaatgtttacctactacttccttctctttttatatataagccagccaatgccgattaagataatgatacctatatagactttatctttatgcaaatcccaccaagataattcgatgactttttctttctgattcattaaggcattcattttgttatttatcgtatccaatcgattagaaaattgctgtaaagtaatagataatgtttcataaatttcggtccgttcttgctcctgtttggaagcggtggtagtactttctttgaccgggtattgttttccggttgaatccggaagcgacaagtaaactgttttattctcaattttcagatcactcaacttgtcagtagtaattttcgtttgcttattcacatccagccgtagtgattcaattaagtttcgcaaatacaagaaatcccctgaatagtcaatctgcttttgcgtctctatgttacgagaagttttgcaggaagtgaaccatattcccgacatcaggaatatggttatataaattagtattttcatggccggatcactgtattacgaagaaaattagaaaattcactcttaacatcgaagcaggggcacgccttaatatattcttttggctctacctctccgctgccgtccagatccggagaagtatcacggtgtccgagtacttcaattatagggtattccttacagagcttcgcgaccaattcgcatagtgctgtcctttgagctggagtacgtgtatctgcaggttttccagatgtgtctagcccaccgatgtagcagatgccaacgctatgcttattataggataaatcagagaatcccttcgtattgcagtgtgccccgtcaatggatagtgggcggccattctctaccattccatcaaggtctatgacgaagttataaccgatctgactaaagcctctttgcttgtgcatccggtcaatgtcctttgcacataaatcctgtccggcacgtgtggccgaacaatgaatgataatagcatcaatagttttcattttgcgtctcctttttgtaagtagttcgttaaataggggatgttctttataaactcaacacttaatacatagtgcaagaaagctactaccttatggccattgctagagttgggtagaatttctttgatattccttagaatgttcaccccgtagaaatagaaaacgctatacgtaataaatgaaacacattgtagcgcaccttccggatttcctttgtgttcaccaataaagtagatgcagctaaccaaggcaaagaaaatagttgcttctacgatacacctccaagcctttttaaaagaaaaactctcatgattgataaggagtgcagtaagtagcccgcaaatgaaattgagggcaaatacagcaataagacttttgatctccccagaaataggattgagataagcagctatgccggtaaccaatccaataagtaagtttttgaaataatccatatcatttttatctaaaatattaatactttattttaatacctcgctacaatcatcaatagctgtctgaaatacttgtttcacttcctcgggagtcagcccgtgatcctcatgtagagaaaagccggttactccatttcgcgaagtattgaagaaacctactgtggcttcatccttaataatctcggcagtaatatctttgatagcctcggtaccacgggttgacattctgtacttaatcctgatagcgtccgtaaccttagttgtggcagtactgttagttgatgtaatgttcattctttacctcctccttcaattagttcattaatttgcccgaaagcacctgccgtaaagacatctgcacaaatctcctttaagagagtagcgtcttctgttgtaatctcaagtattcctcggttatttatgatttgttggagcatattgtaggcacgtagtttttttgccatatccatacctgattgaggattcataccggcagcataaagcgcttccgaaaccatatcacgaagaaactgcttctgttccttgccattgactattttaatggcttccttacctctaaaatctattaaaggtttgtttaaatttaatttcataatcattaatattaagcgattgatactaatagtccttttctgaacttcatattactaccaaaatcaaaatcaattccttggtaatagtttatacttccatctgaattccggcttgtaatacaaccaaaattatcggcaaggcataattcactcgataaagaacctttcacataaactcctccatcaaaaaagccggcgtatgttgtactagccagtgggtagcttctgtctgatgcatttagattcctggaagcataaatacaagctccaccaaaattggaaccaatagatgcgatcccaaaacgtccgtctgtttctgcattgaaagtaacgttaacaacgccttcttttgccgttccagaacctaatttcaaactacgagatgttccgccaaaataccctgaacgcgtccaaacgagacgtccattttcgatagtaaaaccacctatgaacccggagtcagcatctatcctgcgaacctttatcaaatcagtattcaaatacccgcctacaacaattgtagtaccaagttttgcatattcaaccgcatcctcaaatgccaacttacccaatccatcacgatcaatcttagaattaatcattgtctgcagatcactatgaagtgcggtgattgtaacagcaccttcaaggttaattttagatgaatgaatcgtcgtttcacctgctgcctggttaatataagatataagcgtattgccgttttccagttctttagaagcatatatcttattaccgtcagctgtagtaatccaacctgcagtatctatccgctgcgtcaggctgtcaactcgagttacttgtgcggagatttgagtattgagtactttcaaatcggctgtacactcatcggaatagcttttcagtttgtcgtgaatagctttgtttgcttcttcaacagctgtattaaaactagctaaagcagagttgaataaagcgaacttatcatctacattctttttttcctcaatagtcgtttgtccatctgcaatagctgtattgattgcagccataagattatcaatagcaccagataaggataccttggcattaagtaaggctgtttttgtagaaccttccagataggtattcacatatagtttattatatgtagcttcaacggcagattttgtatttttgactgtattcagatatttttcaatggctttcgcttccgccccgtcaatgataccgtccgcaaatgcgccatccacataatcatgtaagccatcgactgaatcggcagcgtcctgcgcagccttagcagcgttcgctgcatcctctaaagcttgtatcgcttgtttcagtgcctcgtcggaatattcctttagtttatcctgtattgccttatttgcttcttcaacagcagtattaaaatcagcataggcagaattaaaaagagtgaatttactatccacgtctttcttttcttctgttgtcgtgaatccatcagaaattgcagcattgatagcattaatcaagttttcaatacttcccatcaatgtaaccttagcattgagcaaaccaacctttgcagagccggataaataaacattcgtgtagagtttattataagttgcttcgatagcttgtttagtgttgttgatcgtattgatatacttttcaatagcttttgcctctgtttcgtctataagaccgtcagcgaaggctccatctacatagttatgaagtccttccactgaatcggcagcatctttggccgctttagctgcatcctttatttcctgatgagcagcttcccattcagacagattttccaatccggaagaacctgcttttatttgaatgttaccgcctatctcactttttaccagatcgaaatatgtatcaccatccggcgaaaggattctttctgttgttacgcggcccggcagaatttcagtaaatccgtataactgaacaaagcttctactaccttcatactcgctgttaagcactccagtgagtaaatgataatatccagctatctgttccattttaatagctgtttcactcaagaggaatgttccggcttgattctccttgccaactttagcatatagataatatttcttttccgggtcaatgagtgccggagaattgtattcagccatatcccagtacttatattcgtctgccttatgtgaagaagaaagagaactaatgccgagtgttaaatgctgaaggattcctgccggagcgttcagtattcttgtgctggcattataagtaatattgtgagatacctgaactggattcgtttttgaattgacaaaacggaattgcaggctttcatcacctacaagcagttgcatggttgaaacggttattggattgacagagccggagaagttcagcagtgcatcttcaagcatggacatcgtttcctttgcatcccggaaccgacgcttagtaaactgcagggcgtccttatgcttgatatctacctctactttgttcgtctcaatcttattcagatcacttgaaacagatgtactgactggttcgtttgacaactctatttccggagaatatggattattaatatagcgcttgattccgatcatgcgaataagagaaccttccggatgaaattgcgtatcatagaaatcaacataccctccgagtactattttaccgcctatctccaaccagcgttttttagcccaaatgccgtccaatgtcccggtaaatatgaatgctttatcttcatgttcatacaggtattttgctgcttccttgaaagcttcccagctcgcacctgtttgtgtgctgtcattacagatataagccttcggcaattgcattccgaacactgcgtatgtatcaccaaccttcgggcgccagacttccggttccggcattgttatcccatcaatttcttgcggaacaatttcaaatcgacgtgcctctttcttgtctttcgcttcatggatatactttacttcgaactccttgcctgtaagcatgccggtttggaaaatgacagtcatactttctccagctatgagacaatcttcgaaattcaactcttccgggatgtctttatctacaaagtcaaagaagttattcttcttgttcacttcaataacagcactgacagtaccgacacgggaaggataaatagctgtacagtccagactatcttcctttgctgttgtaagttctttatcggcacgcatgacacaagttccatccgcatcggtcttatagatacgtgccttagtagaatcgaagccctcttcattctcaaatttgattccatcaaatcggatagtcttattctttggaagtaacaggtacttagatccgtatgtagaataatcaatattgcgatctgtagtttctaccaaaattatttcgggtggtatctccccggattcgcgaccaacaccgaccttaaaaccgtggcctttaccatacgacagtttcaaagggttctccttgttatactcaactttacgcagatggatagtcttaatttggtttccttcaaccgtttcttcaatgatctgccattctgtttcatatagttctgcaagttgattgaaagcatcaagaatataggtgtgattgtagttgattactttttccgttccttcaatgcaatcaccgactttccaaccggtactccgacggttcaggttttcaacgagtagacgtaggtgttcatgtggcttggctgtatatgagaatttaatacttctgtcaacggtatgacgtactttccacagcatagcatcagcctccccagtttccagaatcagagtatattcgaagttacgttcaccgttcttcttgaaattgctatccctcttcaaagaataacgcttcccgtagaagtcacaccaggagccaaccggaatttcaatatatcccggatgagaaaaatacaaagtgagtgtatattctcccatgatagcttcataagagtagctttcatcctttacttcaatttctatttccttatcaccattatgcaaagttatcatattaccagatttgaatttatattataaaatataaatacataagtgtaatgaacagagtgattcatctattcaaaaagatagtattcattttatctattgcgggtcattttttacataagttctctcgggacgaacgccgcattaaaagatttttccaatgtgtcaacaaaaagcctatcccagaacggatattataagctaccagatgggctaatgattcaatggggatacgtaactggagcagcaactataaaaacaatttatttgaatagttcttttttgaatagcgattatattatatcaggtataggagtttattataatacatctgaatctgttgtaatagcaccaattcttgtatcaaaaacgacatctagtattagaatgtgtataagatatagtgctgacagtggcgggggtgggtattcgccgtggccgtattattggtttgctgttgggcgctggaaataataaatttattcaaacactaaatttgatatgaacaatttaagtagaaaaatagtagttataatcatagggcttttcttgcaaagttctctcgggacaaatgcagcgttgaaagatttttccaatgtgtcaacaaaggaccttggacaaaatggatattataagctaccggatgggttattgattcagtggggaactggaggaaatggggtaaatcaaatagtttactttcctactagtttttataatacctcgtatgttgtagtaactactgctatttcttctgtaatgaattctatagtaaaaatgataaatgggaaaaatatatcttatttcaaagtctattcggtaggtccaacaattgaagctggggagatattcggatggatcgcaataggaagatggaagtagaaatattataacatcaatttgcttatgaattgttttagtagaaaattaagaattattttagtgattattttcttgcaaagttctctcgggactacgtatgctttagctgatctatcgaacgcaatgagcgtaaacctatccttgaacggttatgcaaaattcaataatggattacttgtacaatggggcagagttggaggttcatctacagtttcgtatagtgtgactatgcctacatctttttataatactgaatataaaatatttgcaactgtatataaacctagtagtgactccgccgtatattcatcttctcctttggcaataaataaaacagttagtagattttatttgaatagaaattatgcaagtgggggtactactggattatcacaagaatcatgggactggtttgcgatcgggcgttggaaataactaaaaaacaaatattatgaagtattggaaaaatggattctacgatgaaccggtagacggttcagtagaaataacggatgagcattacaatcagctattagatgggcagtctaacggtttactgatagttgaaagtaagaatggatacccgattttggtagaatatgagtacgacattgaagaagtgcgaaaaatgaaaatatctgaaatacagatatttgacaaatcgaccgatgtcaattcttttaaaattgaaggggaaagtatgtggttagacaaatccacacgtgttggattatttaactcaatttcgattgagaaaaatgcagggaaaacgcatacaatcctgtggtatgatgcagtgaagtatgttatccctatacctgacgctttagcaatgttgaatgccttagaactgtatgcgctcaactgctacaatgtgacacaatcgcacatcgcagcagtcagatcattgcagactattgaggaaatcgaaaactacgattatacgataggttatccggtaaagttgagctttctgggataaccagttttgaagttgtatgcttcaatttcttcttttgtttctaattgattgatagcgttgatatgcctttgtgttgtgtcatagcacgcaagggcatataattctagttgttgtaacatgtcaatagctctttcgattgataagacaaactttgtatcaccaatccagatacttgtttcagatcgtccagcttctttctcaatattgattgaattcataagccctacacgggtgcttttgtttaaccaaccgaatacattattaatactaaaatgattcactatttgggatgaatcgaacaatcgtaattcatcaagtttttgcgctctggtttcttcgatattagcctcgtgcacaactaagatcggatatccttttttgctttcaactatgagtaatccagcagattgtccggctaataattggctataatactcttctgtaatttctacagaaccgtttaccggttcgtcataaaatccttttttccaatacttcatgatatttgtttttaaattatttccagcgaccgatcgcaaaccatgtaaaattccagccagtccaaacgatagccggagttgaatttattccgcgagtgagaactttacaatatgatgtatatttaccattaaggtcataccccggagcatatataaaagattcacttgtattatttactgctccagtgaaataaatgttataatcagtattatagaaagtggtaggaaaatatagactaattgctccccccgttgctccagctcttgttccccattgcattaataagccattactatatttgacatatccgttttgtcctaaactttgactatttacttgaattgcattagttccgagagaactttgcgcaaaaatgactacaataatggctaccaattttctactaaagtatatcatttttatttcggtattaaattattttacttccaacggccaattgcaaaccagtttatcccttctgttgcataaacatagtattcagatccatatgtagcaactggaaccaaaacaaaataagttgtatattgcgtcttaatcttacatgacacaactgaaatactatctactgtactatcataaaccccaactattgctatatatttgttatcataaaaagatgtgggtaaatagatactcctatttctgtatgaagaagctaaattcccccattgaatcatcaagccatcaggcagtttataatatccattctgtccgaggttccttgtaacaacattggaaaaatctttcaatgctgcgttggtcccgagagaacttagtagcgttttttcgtcttgggtcataaactttcttgacgtgctttcttcaatcattgatgcaggatgagaagccggatgagagtaattattagctcctgccgctattccgtccagtttttcccgttcctcgtccgtcataaacctgtgtgtggcatcttcatttatttctgacgctgcatgcttatgcgaagcaggtgcataattaccaaccggttgatatactcctgaatggttatggtttcctgccgcttttccattccaatttgttttatcagaatctgttacaaatcggtgtgtagcatcctcggtcacatctgttgctgtatgcttatgtgaagacagtgcataattacctttaggttgatatgctgaatcgtggttatgattacctgcagctttaccattccaagtgcttttttctgcatcagtaacaaagcggtgagtactatccggagtaatatccgttgcttcgtgtttatgcgaactcgctgcataacttcctgctggctgatagacccctgtatgagtatgattcgacggggacgcaccaacctcggaagctgtataagatggtttacttgcagctttcgcccatgcaggcacatcgcttgctggcatagaagttggaaaatcacttatttcaaacttattatgagtatgcgctttaggtgtacgtgcgtcacttagtcgactatcatttccttggcaaacagttccggaagttgtgccaaagttcttattgaaagctgtattttttgagaatacaggttcgtatattcctgcatggttatgtgtatccaaagctgctttcaaaaccttcccttgttcggcagaaaggaccttgccagtaccaccacttgttaggttattgacaatatcggaaacgttgattttcttccctaactctgttgccatggtagcggcgaagttcggatcattattaagagcattagccaattcaataagcgtgtcgagggcctccggtgctccagctacaagtgcatccactgcagcttttactttagcatcaactccagaaactgcgttattggcggcctgtgctgccgcatttgcgctatctgtggcagctttagcaagagctgtttgcgctactgatgcgtttttggctgtattagcatcatcagtagcttttttcgctaaagctgtttgggcttccgatgcaactttggcagcgttagcctcttctgttgcttgttgggtttcttctttggcagcattaatacttataattgctgcgttagcgtcattagtagctttctttgcaagagcagtctgttcaactgatgcgtttttggcaacatttgcatcattcgtagctttttttacaagttctagttgtgcggtagcatctcctgtagcagatgtcatttcttgtataataccgctatactctgacttacgttgggattcggcttctacacgttctgtttcagcagagatacgcctagtctcatttgaggaacgagtatcttctgcagctttgcgggtatcttcattttgctttcttttattttcttcggatacccgggctgtctccgctgatttacgttctgtttcagcggactttcttttgttttcttctgatactcgggctgtctctgctgatttacggtctgtttcagcagatacgcgttcagattcgacagtaacgcgattatcttcggctatcacacgtgcagtttcattcgtttctctcgtggattcggcttcttttcgttcatcttcggctgttacgcgatctgtttcagctgtagaacgtgttgtttcagccgcttttcgtttgtcttcttccttcacacgttccgattctgcagaagaacgtcctgtttcagcggtcttacgtgcatcttcattacttttacgtgcttgttcatctgacactcgtttattttctgtttcaacgcggctaagttctgcagatacacgttgcccttcagcggtcgcacgagctgcttcctctgctttacgggtattctcatttatgatacgtactgattctgcagctgaccgggcttgttcttcatttgaacgatttctttcagcatcgatacgagtagcttcattgcgttgtcgagtatcttcattcgcttctatttgggttcgggaatcatcagccgcctttgctgcgtcattggccttctttgttgctgcaactacgtcatcataggctttctttatgaattcaagactaacttttacacttgtttgtacgccattcaccattttaacgccaatagtgtacaatcctaccatgctatcagcaagcgttaattcgctgatttttttctttttaattggcataattttttaagtcaatataaaatattccatcttctgttatgataaattctcctgcttcggatgcaagcaggaagtctgtttctccaatccggaaactagtaaatacaagtttcaaggtaaattcccaccataccccattattaagaagaaaattgtttgtctggcaactcttataatagcaaggatagctttcactccactcatcacaataaaatatacgttcagcatcagaatactcatatccttcatcatcgaccttagcagacagttttgtgagatcatagagtagggcattgcgattacgccagaacgcttcaatcgtcccggcccgcatcaggcatttgagagatacttctttggtttggaatttcacaacttcaccgtcatagattgctccatcttgacgtttgaaattctgcaataggttcttttttactgccggagttttcaatatctcggcattactacctggaagaactattacgccataatcggacaaatctttattgtctatttcataaccctttggcatagcgatagaattaacagggtcctgatattcataatttgcttcatgaggaaaatcgtttgcaaaaactatcttcgctatttcaagtctaggataaattgtatagctattctgtgataacaaacgtaaacgatatgttttaccaagaatcggaaaacggaaattatggtatcccatatcggaaaggagcgctattaatccaccaaatcccaagtcatctctaaagccaaattctatactaatttcgcttgtgtcgagggcaaccacagaaagatcaaattcttgtccgtcttcctccggccagtcgtttttctccggatctttcaaagtagggaaggcaacaagattattgtagctcccctttataattgaaataccgtgtttggtatacatatctaattcatctattagtaattgtcctttcatcgcttcagtattatgccttttgtgtttaatgtatcaatacccagctttatagactctatggctttttcaatcgcttcaagccgtgctgtatggctgcttatatcagatagataagtgataacaatatcattgtatttcattatttctcccatatatttatccaaatttgaaagatatgcgagtttttccgctattttatccgaattagactggagatgctttacaccttcattaattgaatatgtatgagagatcataacagcaaaactaccgtctagcttatctgcagagtcttgcgacatagaagcaaatcctttctttgatgcctcacgttcttcatcatcatctttgccaaaaccatatatttctgataatgcatcgcgtttagctttcatttcattggcaatctgttggccttcggctttcaatgcattatattcatcctcggtcataccatcatccattgcattatatagcttttccctccattcaatcaaccggtccatataatcctccttaagcatggaattaagaatggcatttctcatatattcttcgaagttgtctgcaaaatcagcactatcggcgtccatatcagtaagcaagtcttggaagtcagagcggagagaactgtaatcaataagagtcgtatcagcaatttgttgttctaatacttccgcaacctttgcgacaccatttgctatttgatcggcaaatttttgtgtatcggaatctagttgtgaccaaaatatgcctgcattctcctgaagctttgcaagttgatcatctgtcaaatcaaatagaccggtcatacgtccgcccattttctttttgaaatcatcaatagacattcctagtgtgtccgctgcttgtttccaaccttcccaggacatatcttcaacttcactatatcccttcgagtgtgattttccagaagcaccagaatttagatactgttgtcctaaaaccctagcattttcactttgcaattttaccattttaagcgctttttcataggctgcattggcattatctcctgtaagagtttcagctaattccagttgcttttcgattactctatcaagaatactgatataagactcatacgtttctttcgctttctcgtatttctccgttgtatcgtcttttccgaacaaatcaaagattttcattgctacctgcattgctgcgccaatgatcgcaagaataacagacgctttttcaactgtactaatagcgttcgctgatgtatttgctgctgattcaacgccagacatagcagtcattgtaaatgctccgatattaccaatcaaagagataatttctccagcaggtccaccgatcgtttttccaagttcatctattgtgtccgctagttctgatatctgtgctctgacttctttctctgcctttttaacttggttgtctttcttgacaaccttatcttttgctgcgttgtagttttcagttttctttttaacttgctccaaggcctgcgcttcggataaataggctttagtcgattctattttacctgtttccggattgtatttagaggatttgatcccattctcaaatttagcacctcctttcacagcctcggcttttatccgagcattttctaactcgatttgcgcattggctagctcttcttcagcttccgctagttctttcttcttatcagataatgactgaaacggattacgggaatccaattcgtccatgatggattgaattgtactcgtatattcgcgaagttgatcaggagatagaacttgtgccgctgtactctttgcattctctaattgcgttaaaagggaattaagagtttcggaagaagtttctttcaagttttcgaaggcgcgaacatattctggggattctttcaacttatcgtagtccagtttcattaactccattcccttatttttcgttgcttgagcaatggaacggtctatctgttctacctgatttgtatctccattcttcgtagcttgtttacgctgttcctgtaacgttgcaatatcctcattaaattttcgttcaatcgcaagacgctggtctgtataatcctgatactgattcaacaggtcagataaatcatctccgcgatcaaactttgtattggtagcgattgtagcttcttttgctatattatcgaatgaagcaaacagttttttcgtagattctgaattgatgaaaacatctgcattaaaaaccttctttttattttgaggattgatttcaaaagcagctcgtgcatcttctattactttccgtttcttatcctcggtttcgcgcttaatagcctgtaattctagccgatgattgagtgctctttgccttagaaccttttcactgctttctttaagtttattgatttcaatctgttcaagttcatttgctgaatcttctttcattcgttcctggtcaaacttctgtttctctaacaggagtttatatttttcttgttcttcacgtaatttttgtgccttatcatcttgcttggaaaatgaatcataaacttttaactctttctctgcttcttttagctttttgatgttttctttgtaggcagtaacgacagtagcatcaatccctttgaaatttccagcatccatcaatttcttttgagccgaagctattgaatctagtgctttcgttgcatcatctttttgcttggtccaaaaggctttattttgaatctccgacttttccttttctttttcatcttcttctttcgcttgtttttgaatctttgcaatattatctacaaccttttgagctgcatcaacttctattttagccctgccaagttgtatgtcatattgtccggaataagttccacgttttgaatcttcagcaattaaagcctgaattgagtcataattacgttgagccataatcaatttggtttgtgctccaattcgtgcacgtctctgaacttcttctgcgatcatcttatttaaagaaaggatatccatcaatttaagtttttcaatatccatattcttaaaaatatttggcataatgctttgaagcttattatatgctataactttctcataatttgcagaagtctcatcgcgtatcgttgaaagtaaatctgtagcactttttttcaaattatcagcttgttcggtatatgctttgcatgcttcattatattttctctgtactttttcagcttctgtctcaaccgttaccacatggtatattgcgtaaccaagcgttgcaaatgcagcggcagccagcacataagggttggttaacatcgctgctgcattttttaattgtgcaatcgtttgggctttgagagcttttgtcaataaaacacgtgcagatgtgtttttggcaatcattgcagcttcaacggcatacatgcctttagtcaataccaagttagccgcttcaatagtccgctgcttgttaacaatagctgtaactgttgcatgtacttgtttagcggtacttacagccaaaatacttcctttatatccagcgagagccgtagtaacggtaactattagggcaccaatagtttttaatgattcctgtgcatttccattatcaaatgccttgtttattgattgtgcggcacttgatatttgttttaaaatctcttttccaaggggacgaagggtagctgttatattattgccaagtagtttcatttgattttcggcagatgaagccatttctttaaaggctgcttctgctgcaccggcagaattattaacttcgtctagatcggaagctgcttccttggccttttcaccagtaagcattaaagcagcttggagtgcttcatcggtacccaacaattctttcattttggttgatgaaccgcctgctttgtcataaataagttgtaatgcttcttggaaagtacgtcctttgaatgcagcgtctcccaactggttggctgtacctaagatagcagcacgtattttcgtcattgcttccgaagtgggaacaccttgtttggtgattgatgctactgcgcccaggacttcttttatatcaatgccaaatgatgcagcaataggtgctgcttgggctatacttttgcctagttgaccgaaatcagtcttacctaatcgaacggtggtaaataactggtccgaaacttcctgggctttagaagcatccaatttataagcatttagaactgtagtaatagcatcagctgcagtagcagtatcggttactccaccaacagcagcttttgcggatgcttccaacactttcattccgttggctccgtcatgtccggcagatacgatctgatagagagctttggctgcttcgtttgcttcaacggggatagtacgagttatctccataacttgattcatgtaatccgttaagctgcctttaattccatttgaaagagtagcaacttctttcatgctttgttgaaactgtttttcaaagtcgtatgcacctttggcagctctggcaaatgcgatacctgcactaatgccgatcccaccgaatacatcgaaagcggtaatttcactggccattgccttaatgattcccatcgcttcctgacgcccggaatatagtcctgaattatctatgcctgttgcgaaatacaacgctccatctttgttttgaatacccatatagcatttattcttaaaatataaagaggagccaaaatttggctatttcaggaagaatgagcatctttgcagtgttctaagaccaaggaacagtttttaatttactctagggagttgacaagcctacaatatcacaatataggctatcaattccctttgctgcatagtccctagtgtaaatgaaagattatgttccttggtcggaataaaaggggagagatagcctttttctataatatataaatcactattcattagcgccatgaccaaggaaaatgaaaacgtatccatagcgaataaaagtagctatacggaagaagagattaaagctgcctacgagaaagggaagagtgaaggaagaattgaagggatgctctcttatcagaaaagattgattaaaaatctacagcaggataatgcttctctcaatcagatgcttcaagaaatgaaaaaataatcccctgtatcttcacagacacaagggaccaaaaacaactctaaatcaatttaataaaaaaacagttaacctaatatataaacacaatggcaaattactttatcttttgactttcccgttaatatcataatatcttttcatccggatcttctcgtttggattatcaaaacttggtagctctatccattcatagtctcgtccttcgacttctccgtcttcatcagtcgttttatttcgctccctcattacaaaggagtactcctgaagcaatatctctattaatccatagctactatccagcgtctcattaaaagtcaatcctagagcttcttttacaataactaagaatctactttggttgtatccttccagctttgtagatttttccgagcggctattatctccgtctctcgcaatgggctcacgttccgaagcatcgtgatagaggtacaaaaagggtgatatcctattcgatatataattgcattgaataatatgcgtatatcttcccatgtggaattgtctgcaagagcttgtttaaaccattttggcggatcacttggcttattatgaatacctaagcatacgatatcaagaagcagttctccgtacttatccataattttgggaaaatcttctggcagctctcccttttttacaatcatcctatcaatatcttctttttcaatttcaagaagaagcggacgaattctaaaccatgtccggacggtaattggttttattacaatactattacctgggtcctttccattaggaatagaatctcggttagagaaatcaaatgggattcttacaggttgttctgtaacagaatcagattcttgttggaataagttttttatactcataaatttcatcaaggagcctagtcagttgtacttcctgacaatatgtccagttattcgcgactaacctttaatactttcggctccatccttcaaatagtttgttcctgtgagtggattcgaaccaccggtttctactaatgtagtgctttaaccaactaagctacacaggaaaccattttttactctactacttcttcgccttcgggatttgctggattttccggggcttctccgccttcagacacgcttataacttcacgcataaaagcagcctttttttctccggaagctgtaatagctgcctgcatatatacacgtacaagtaacaactccgcttgctcggaaccgggagcttgtgagatcttagaagtaatcttaccattaactacggtataaactacctttttaccgtttttgggtaatgtttcacactggaatgtctttgagatagaaggaacgttgattggtttcttccagatgtttcttccgtcagctgtatcaatctcaccacctgctaactctttaagtacttcgttagaaggagtaggaatagagagctcgatgtaatctgttgtatcttttacaaattcaacatacaaaggttcatcgcttccttccgtttcgacttttacttctttaggatccgcaaagttgaatactacacttccttttgtcggaagaggaaaatctttgaggtccgctcctggaacaccgtctccgactgttccaaatttaattttacctacgcccatagcgataggtcttacttctcctgtcataattattgatctattaaaatttctaatctaatatttgtacaagcgaatttctctttcaagtccggcattggaacactccagagaactgtcacttctttacatacaccgtcattactattgattgaatcaagcgacttccgcaccttacgcttaatttccttcatgcgttgacgttggtgcataccattttcattcaaagggacaaagatgttgacgttaataggcactttattaatgaagtcgagttcattcaattgtagatgattgataacgatatgttcattggtcaagcctgcttccgatttgtctttgtaaatcataacatcggtgcccgcagcggccacagcattataaactatatctacagcgtcaaattcatccataatcaaatcttgctaaaaactgatttcaacgtatcccttagatacttctcacattgcgtattagcccctgaaacgacttcatatcctttagcttccacggcagccgcatattccattcctgcaacacctaccaatacataaccaccagtataagacagtgagacttcttctgcaagcctacgccctttatatttaccggttgtcttatcaattcctttctcactttcggtaaagttctctgcaaccacttctccgtttttcgcaattatatatccgatagatgaacgaagattgccagtctggtccttatatgagccgttccggcgagctatatcgataaacttttcacctcctgcctgcaacaatacaagtatcttgttttctgctttgctttgaaagtgatcgaaccaacgttctagtgaatgttggtcgaataggggagtcatgccgtttttcatgcgttgataattgaatgtgattgataaggttcccaacagataatcggtacatcaataccctttgatgcaactttcaaacgcaaaaacttactgtctgccggcggttggattttggtgtaaaaatagccatgtacttgcgcttcatcaccagcagaattacgtttatagacaacagtaccatcacttacaggatcataacgtccgggaacggatatttcaatcggtttccccggaacccattcaccgtttactgtctttccgttaacgtcgatagtgactatcgctgtatgtggatatcgttttaccatctattacctgcctttcctttgacaattattcgtttcccgagtttaccggctttctccggttccccgttttctatatacagttgttttgcagtctggatatagaaagaacggggatgagtgatagaaagcttattctcactgaaatcctgtgagtttactaacatggcgtacgtatcagcgacacaaagaccaacttgcttcatgttttcagtagtacattccgcttcggggttgatgccccgcttaacgaagactaccttatctaagaagctttccatatcctcaatagaaggatattccagtattgtttctctgattgttgccatatagtttactcttcatctgttttttcagtatcttcaccttcttcccatgcttggccatcagttttcatgatgtacattgcatcaggatcattaattacaggaattgcgttggcttccgctttagtccactccttgaacggttccagttcagaccacttgctgatgaaaacaaagtcttttttcagcgttgtagctttcttcttgtattcaacagaatgttctgctgcgataggaccatgctgaatgtcgccacactgtaaatcttccaggaaacaaatattagcggattcccatggatttacagtagtacgttgatgagcagcattctcaatacgaacagacggacttacaagaacaatctggacaccttccgtattctcttgggcagcaaggtattcattgataacctttttggagatagtcagtttttctttctgattgatccagccttttaccttttcaataacagccttttgcttcttcaatagagcaaatctgtctttgcgcattactacgtatttgatagtaacaccttcggcagaagcggcaaccacagtgtcctcaatatcctgtaagccgtcggccgttgtagacttagaccaatccacagcagcaactttcttgttttcattaggcataccacagcctacaaattcttcggtaacaatgccattgttattgcttgaattgagaatgaagccacctttagacatcaattgcatacaccaccattcgaaacggccacgaacagcgttatatacgaagtcttgatctttaaaagcaaggtctagaattgatttcaagtctgcatcaccttcacaatcccggctaagttgctggtattcgttccagtcgctttcgttcataccgcgttttacggcagtcttagggatatcacctgacatcttgccgataacttcacgtttcttttgcggtgcagaagaatcgaatgaaataacatcagcgataaccggtgcacctttttcgccagtaagagtttcccatttcagagagttcttctgctttacaccaaagaaattagggaagaataccggcttaactttacgcgagttaagacgggcacccatattcttacggttcacttgtttaattaaacttctttccatacataattatgaattaatggattacataaaacggataaaatgaagcaatgccttcattgcttcgtcaatagggtagggcattactgcctcatttacagtaccacgtaccagaagtcctgattgctggttagcaaccgttacatcaaccttgttcattgtaataacttctggtacatatttgaacttggcggctttggcatcagctttggcagtaacaagaactaatacattacctatctctgcagctccaattggtccagcaagggttatcgtatcgtagcctgggttggtcttgtcgattgcagagattacatcagcagctccagttaaggcaccaccaacagtaacagcctctccaactttaaacacatgattctttgctatctgaatagttactgcatcagcatccgcaacagccgtaattcttccggtcttaactgtatgataaagaccgttagcatccttacctaccataacaagcggaggaagttcatcaatgattcccttcagttccgcacgggcaatagtaccaccgccctgaatgtcctcaataatcttttcgattccgggagcatactgaaattctttttgtttttttctgaacatagcttttaattattagatattattcatcgaggccaagactggcagttccattatttgagttttcttcgtcttccataagttctagccattctttttcagaacgttctttgggcttgtaggaattaggcttgtaaccgccaccggcgacctcatcatctattaccgactgtctgatttcagcgtattcttcttgcaactctttaatctgatcttcaacagaagtttcagaattgacatcaatacggttaaaccacttttcagggagttttgcatctgcaaatagtgttctggctgatgcctgtttcgtggaagttgtgactgttgatacgacagaagataccgatgcggtcaactcggagatttgcttctgttgggctttcaatagcctaactacagatgcgggcaaatcttcgaagtcttcatcatcgtcttcttcatcatcgtcttcggattttactgttttcttagtctttttagccgatttgataggtttaccatcctttaaaccattgttcttttcatactcggcaatagcatcctttttcgctttttctattgcggatgtgttttcaagatcaggaagaatattgtctttgaacaaggcaatataagtatcaatatcatcctccttttcgattttgaagagtttctgaacctttacagcgtacttttcatttacacctgcggctttcaagccctttttaattgcatcaatgattgtcataacgattttctattaaaatataaggggagtaaatttttcctgcttatatattttattccggaatcaatgactatatttgcaacatggataataagaagaaagaatatagaaagaaagctaaagaactcgctcttcaaaatggattcgatcaagtttcctattatggagaatggaacggctatttagcatatacagtatcccggaaagaagatgcaggatgttgtattggttatcctcgctttatccttgttaaagatagtgttgctacgttagcaccatatactcaatcagaagatataatgggaatgacttccatgcctaaagaccatgtagatacattactataattttttcactattccgtcaataatatcagtatttaccaacaaattgtctacacgtaatacattaactccatatctcaaacttatttcctttgatagttctctccaatttttcatctttccagtttgtgggtcatatattattatttttccattatgtaatttttccagagtaataatatgcccagaattcttgcctttccaagcaaaatcaatatgatatcttcccggttcttttactagttcaactaattctttggttaactcttttatacttttgctttttaaagctcccgatcttgttatatcatatatgcctcctgcagtctgttttttaggcataaccatagtcttggggtcgatccatgcccaattggtccgcattgataactcatatggaatgttccctgtcttttgaagatttggtagagctgtaacattatatccacgtctcctcaattcattagcaactacgcaagactggcaatttacactatattcgcttgcttttccataattaatgtttccccgtaactcattagcttcttcgaaggtcatttctttgcctttttttacaccaatcttctgttctattttggcttggttgaagtttcttacaaatcggtcttcccatcttttttgaatatcatttttctctgcatcagtcttgatacgtttaggtttagaaacctttataacttcattcgtaataggttgggaaactatttctctttgtagtcctccatcattggtaaagttatccttgtaccagaaagcagattgtaatccatctttattttcgctgacgaaatcctttgccgcctggggaatatccgtaatagtttggccttgcggaactgtgtcattcagcaagaaatcagcaaagtcttccggttccatggtgataggagtagcaaaacagatacaaaaaggatgaaagcctgtaaacttgaacgttttcggatatttacctaccattgcatcacatatcttgcacggtcctcgattattggccgagcgatgtacctcaatacctaatatgaagtcctgtttgctccaacgttcatagtccgcactacgataagcaatgttcgtagttgtagcagatgtccggagagcgttcttatatgctgaacgataaacaccttgtcctggatgataattcttcattggttgtgataataccaattcacctttctcattccggatcctgcgaaagcgtttttggggattttgcaaaatttgccgtatatcgctactgattccgtttgcattacgtccggcaactacgccactatcaagatagaattcgagttgcgatttcgtttgttgcgtaatattccaaactctatcagataacttgaatccgttagcatctatatcgttctttagagtttcaaatgcagataaactatgagcgaacataccatcttttgttgcactggaaatagacattcccttgatgaactgggaaataaaatcatcattctttctttctgctcgatcccagccgtccttttggaatgcagagatattagcatatagcattgattcaagattcagcagttcccggtcaactgcactctctattctctgattacgtatccatacgttatttttccccgcatcagaccatttatggagatacggggaaacagaaagaataaattgattaaagatattagctattacggcctgctgtgcagcaattttctgtatatgttgtttatcgtagaaagaaagtccgggcatagattataaagttgctccaataaatgaattattctgtgcagtctctttttcgtcttgcttcttacgattcaattctgtttccacatcgtcagtgtatggtgaattctttataatcgtttccttgctattgaattgagaagcagtttcaaggttcttgagttcttcagctagatcttgtgggagaatgctaccaaactcaacctcaatgtagttatcatttaattgcgatgcatatttagtgtgcgtaatattagccattccagcctgaactattgccactgtacgttgaactgccgggccgaatatctccatttgttcagatgccttaatctctgcatcaatcaacataaaacgacgtgaggtaccactaaggttgccaagccccattagtttactcatagataaatcaggacttgaagatccggaatgtattgcatcatctaactggttaagttcaagtgttacggattcacaggactgttgccatgctaagtaatctgcatcaccatgatatgtattaccggtatccgcatctacttccatagtaaagtttaactctttgcctacagtttctttgctcggaagattagccaaaccataagttttcagtatcggttcggaaaagtagtcattagtatctgataggcgggaaagtctcatttctttcttgtctatcaaattagcgacatcttcccaatccggacaatcgacttcggcatatactaccggaatcttgccaaaacgattctttatctttttcacttgccaaacaccgtccataataccggagtaaataacatctttcgtatagactttcacgcattcgcaagtacggccattgacttctgcattgtacttatagataaagccgtccatatcgtcgtcttcatcaaagtgtggataaaattcacattcgacattactatccttgggagtagatagaatcttaaccttcaactggctttttccatcatctttagtgaccggatagaatataatagctgctttggtttcagataacaccttgcgagcaaactctttcaataccgattgcatcttgagctttcgcttatagaccttcttaaactcatcaaatccgtcattcgaatcttctgctgtgatagtcatttcaccgccaaacagaaaagcaacagatgtgcggacgatctttttaggtaggttggttacgaccttagctacatcgacagtcttgtcttctagtctctttggcttttcggctcctgtttcggggtcaatttctacttctgtatctgaatatacagcaatctttttaggctcccgatacccaactgattctttacgacgggttctgtctccattgtattcctccatatattcacgaggattacgattttcacgggtatcaacgcataaatcacctactatgctaccgaaatcttcatttttcagaatattcttaatgtctggcatatacttttctcttaaaatatacacagaaaggaacttatccgcgtcctaccttacgagtttgcttcttaaatttcaagccaagtgactctgcaaactctgcaaggattgtcatgccatccggagcatcgtcatgagcgttatcaccctcgcgcttgtaactggtaaacgctttcatgaaacgaccgtagtctgatcctttagaatattctgtttcatcaagaaaagcacaatgcttctttatccagccagctttcatgatgatacgtgtttccttgtgctgtgttgttgcccgggcttgaatcatacacgatttctttttagctgtaacaagtttgcgtacattgatagcaaatatacgcccgccattgtttgattcaatacgtagttgatcgcactctgtatcaataaccatttgcgccaggcgcggttctgtgacttcgacaggatctttagtgaaaagaatatcggtaatgaagtattttggaccaaacacctttgcgaatggtgcgcagaaatcatcatctcctttatcagcagtatcacaggctccgagtgttccatcaggttttttccctgcaatatcggcaagtttgaagcgcatgagagacgatttggggaatagtaaccctttggcctcgaacggttcctgcatatattcggccatccaaatactttcgtctgtttcagaacgtaattccttgtaatattctgtagtatgaacatcggcgcagaaagtttcatcattctcatccagcgcagcaatacgaatgatttcattgtacttgccggcttcttccatgcgtccaaggacatcattagaggaccagcgagtaccaatatcaatcatacagcagcttccttcaatacgggagtcatgcgtaccctgcttccaagaccataccttttcattgttattatccgataatgcatcttccagactcttgtacaagtcatccgtcatggcgagcattgacgcaccaaatccaataacggtaccaccaacaccaccaccgaagtagcttacctgccgagcgccttccacactccagctcttgacattctgcttatcaccctttaaatggatatcgggaaatatttctttaaaacgcctagatttcacaacatctcgagtatcgtatgatagtttattatagagagtatccgaacaacagttacgcataactgactcttccggaaagtgtccgtacatccaggcaatgaatagagaagatatataagactttccggcacgtggcggcatactgacagcaagacggtagattatactggcagaatatgattcatacacacgcatgaacgcttctgcgaccttttttaggaacagacgtttagagaaaaacttcggatcatagtacaaacaaaacgcccaaaagtctttctttgctattcgtttgcggagtatggtagcagcctttgctttacgaatcaatatttgtcttttactcttcttctttgccatcaattatagcctgtagttgttcgtcactcaatccttccaattcatcaccaaggttcacatttgcatcaacttcttttttgtctctccatttctccggctgccggttcttcagccagaatatagcagctgtcgtatcaggtgggtaatactcaatatattcttttgagtctgttattcttccttcggatgttgcaaattttgttgccttacaggaataaccgatagcacgattatataaccgagatgcaacgttcgcatccgcaatattctttcctttttttagggactcaagaaattcgggatagtcttttttccatttatttaaggtttgctctgaaacagagaagaattcggcgagctctttatctgttgcacccaacaaacaaagctttagagcttgatcggcatactctattctgtactctgatttacgccctctttttttcttctcggccggattcttcttctctgtcataaactaaccaaaactagcaaattgtgataattcagccctcaattcaggcaaccttccattatcaaaatagaaagaagaacgcatttttccctgtttttttactccacgcatggttttacacaagtgttctccttccataataataccaactgctaacggtgggtgttcttttccgagtgcatccactatcatcgtaacgacatcttgagctagtctctcctgtacctgtaagcgggctgcacaataatcgataacgcggccaatctttgagatgcctaatatgcttccttccgaattaggaatataggcaaaccaatactttccgaagaaaggcatcatgtggtgctcgcacattgagtagtagttaccagagtctgcaactatactattaaaggataatccatctttaccattggggaaagtcgttattttcggtgcctgttcaggatcatatccgcgaaatagttctttccacattctgacaatgcgttccggtgttccttttaatccttcgcgttctggattgtcaccaatatacgataggattgttcttactgcacattcaatatcttttgtgtctgtagacttagtttccattttgggtgttcttttacgtagttaataacttcttctgtgttttgacaggaacatggttgcagataatatactgcagctgtcatggcttcataggttgacagatcttgccctgtatagacgacttttatttcgtgaggattgacaacaataactttgcttccttctttcggtgagcaagtaatccaatcaatgccgataggaaggggaactgtcccgtttgtttctatctgaacgaacttccctgcctgatggagcttattgataaactctcgatctacctgcaatcccggctcgccaccggtcaaaacaacgaagcgggtagggtagaagcaaacctctttgataatttcctcatccgacatttctcttccggaagaatgttgtgtatcacagaagggacatttcaaattgcatccagagaaacgaacgaaaacagcaggagtaccagtacgataaccttctccctgtatactgtaaaaaatctcattaatctttttcataccacgcaatattattttcagattcttgtaccattactttaaaacatcccgggatctgatcacaaatccattttgccatattctccgcagttgtattgaagggaagaatctcattcagatttttgtgatctagtttgtcctggatcttctgtttgatatgtgtaaaatcgactaccattccattggaattcaagtcttttgcctggcaccaaacaattataatccaattgtgtccgtgtaggttctgacatttactctcataggatagcttcaaactatgtgaagctgatacctcgatacgtttcttaactgtgtacataataactatttataaattgataatacttgttttatttcttcttcttcctgcttacgtccataatatccagattcaattagaggaagaacttctcgtttgatataagtgatattccttgcgatcacttcttctgtgaagggataaccatttagagcaaaggctataaacttccggaaacaaggcttgcagctccaacactctttaccaccttccggagaatagcagctaaaggaagaagtaaaagcttcttcaatattgcctccttgttctacgaaaattctgataagctctgtcttggtgtatcgcttaaagtcaaggtttattttaatttttctttcctctgtccaatgttgtttttgatagagatagtttaaaagctgttcatagatatctgcaaatactggagacttatcaagaactctatccccagctgtagcacccaggcagatttcatttccataattggaggcaattccaataagatacatgttccgtaatggaataattttatcttctcgttcccacttggataggtccagtttatcaatgattacgtcgctgggaagacgctttatttcctcttgtgagtactttgtattcatatctacatatagtttcacatctggtttccaaatcttgtctattagccaactatccatgcctcccgagtaaaggagtactttgttattataagaattgttttgcatactgttgaaatttaatccattcattaaaattgtgacgatttactaaatcgtgattagccacccgcatacctttagggggattgtgataaaccatcttattattctcaaatacgtaaacttggccatactttgcaccggccagccatgtggtactatcaacactatcaaagtttaaaaaagggagatagtttgtattagtaaaaccaagcccatgaatacgagcatttgctttatgagcttgatctataaaccactttaagatcatcggattctgtctgatccgtcgtccttcctccatagctgaagtcgtaccaatagcaacatagctatagttttcgcacatttggagaaaataatcttttcctctattagcatgccagacaggaataggctgacgacctgttctgtcttctagataacgacggtagtattcgaccttttccaatccaaccacaacgtctatatcaagttcaaagaatttctgaatattgttctgaataataaagtttgcatacttttttacgtatgtatcccaatcaaagttattattcttaccggagaacgcagagaaagcaccactatcaaggatatgtttttcttgctttacatactcaccatatttaccggatttgtgttcccaaaatgagctaagaagataaatattgcttgtatcaagtttccatcttctagcactagatttaaaacctgccaaatatagtatcatatttcgacggctttaccgcaatgcgggcaaacaataactttcttttgtttctccgtcttgtcggatcctacaaagaaactatctatatcggcaggaatatcatcaaaaggaatatccattttccagtctccaagtttatcaatatcgaaatcttccacaatagcagagaagttaaaacgagaagtatcggaagtatgattatctgccaaggctagcagttttctcttttcatcttccgtagataaatctttgcgtctaataacaatgagctccgttccgtcagactctacaatacgcactttgagacctaacttttgagcttcctcatacacgccgtttccagcgattaacacattgtcacggtcggccaatacggaccgaccggctccacattcaacgaggcttttatgaataagccgcttgttttcgtccccatggatacgatagttccggggatcaatcttaatttctactttttcttccatgaccaaggaattttcactaaaatatagtttccccggctattttctttctaataagttcctgcactccgttataaatttcatatagttgtttcaatgtctccggaccttcccagtcggaaaaattaccgtcctggaagaaatgaaactcaaaaacacgagctgctactggacctaaatcaaggctttcaaatgtatctcttactaaatgcagtttatttagtatttcagtatttctatcttctgattcatccgggatatcttcaatatccagccttgaataatctacattatcatccacaggcaggggcttgtatctactcctatactgtgaagtaggagaggatgcgtttagctttatcatcttcaaaacaaagaaatcaagctctgtatagccatttttttttgtttcaagtagtttgtcaagcaacctgtttttcttttgaaggagcgaacaaatgacctcattcaagacatctgtcgcttcatcaggaatgccggcaagcccacaatgatacaaagagtaatcaagccagcgttcgtagcgtttagttatgtaattatttactgctttacttgccataagcacaaagattttatatatttgctgttcctaatagctataagctttgtgcttatgagagtggccggcggtggtacgctggccgcttttatttttgcatttcttcgtacaccaaaagcacacgtttacatctatgtgcctcttttaattcctttcgatatacttcgatatcatccgttaaatcttgtactctgttaactacggacttgtttaaaatgctatctattaactcaactcttggaactttgtatttcatattgtttcctcccagtcatagttccataatcctaattttcctcttacattttcaattggcttttcaaagagaacgggattagtgagtacccagtgagaaacacctttatccgcccatattgagggatgattttgcacacagtctacaatctctacactaccgatgatggagccaaaaggaagatcgttgaaacctatacggctcataggtgtattgagcacctttaatctttggcttggctgtaagcaaccaaacttagcaatatctccctttgcacttgaatgtataagtacacgtccacgaaaatttgtttgccaactccggttctcaatatctttgataccgtgaacgatcaatgaggcccacggctgttttactgtcaatactttaactctcattttctttagttttagcaatgttataattacacaaatacatcccgatatccatttcggctacatctggaggaggaatactttcaccgtaaatcttacgtagagcctctttattgcctccccatgctttccaaagtaccatgggctcatacttatcaggcagatatggaaatagctcacagaaggttttgaagtcctgttttgctttttctcgttctcttctggtattttgaactcccgttacgatatctttaatcaagttctcattacgggaatagccagtttcagccttttttcgtacaagttcattttctctatgctcaatttcgcgtcgcctgtctttgcaaaattcgacaagtgctaccataatcgcttgattattgatcttcgatccccagacgaattgtccgcggctgccgttctttagctgggagaagaaaatacataactcggctaaattcaggtaccagtagctagatagtatcgacagggctgtttctgccagctgggcattagtcaactcaacaccggcatatctcagcacagatttcaaatgctcggtaatgatctctaccgatgttgagttgctaaagctcctgtttacgtctgccaaagtgggtatattctctgcattagccacatctgacaatgagacattacagtttagttgtgcgattgtaccgctccattcagcgaccaattgagaggctgtcgatccagcttgtaaggcctgctgtatcggtgttagttcctttctgattgctgtcttctggacaatctgtgacggacttagcactacctgcagttctgtttttattagttctccgttcatctttcttgtttttaagctcaattttcaaccaactagcaaaatgggacatagcatctttgggagacttcgctgtttcgcctttattctgttgctccatgaaaaactgcttcaaatactcgtaaaaagcttctagtgtaaagtcattgtagccggaagaacgagtattcatcgttactgtttccgcccatgattgatttgatttaagttcggcatagcaatcatctaaggacttatcgaagaagctatccgccggaaaaagttctcccacgcgtatatgtgggggagaagattttcttttatttactttactttgttcattatcacctacatttattgagttattgacgtcattaatcgagttattgacgtcattaatccaaaaatcagggataatttcaacatctttcctttttgaagtgcagcttttaaatctattttgaataccacgggaagataaaatatggaactttctatacagggtgttatcgaataattccacttgtagggctttcttcacgacttcacttacagcgccctcggataccccgactatatcagcaatatcaaaaggcatttctttgtcccacacgatgtaataccctttatccttgtagatattacatagcaggcaaattagtatagtgacagaatttgggccacaagcatttattatcttgcgtactttcctatcagataagaaatctgtatctaaaggaaaataatccagtccctgttttaatggtcttgccatatttagatcttttttatgccgtcagcttttgacgtattaagttcatattctttgttacgagcccgataatgcgttcatgatactcggtgttttggttacagacaccacgagattgaacaatacttaacgtcttcaaattgacctcgactgtttcaacatgtttcttgcctattcgggcagaaagaatgagtgaatccttttctttataatatttatttgtaaagacgcaatggtgcatgatttcaccttcttgttgaaactcttcaatacttttgagcggtactacgactattttaccatcagacatttttaggtcaaagaacttcgatttttctttgatataattctctgcatccttcttgagtttaagcaattgttgcatttctttagccttgcgttctttttcatcatcacgtttctttctcgccacatacaagtcatgagctttttttagattcttaggacaaacgtaatgagcgttatgcagatctttatgataatgatctagtagtttcagataatcaaaccacatcgaaacatctttaatccgatatttattacgaagacaaatttttatagacggccaatacatatcaatcttgtaacggtgtccctcgaaataatctattaattcataacgtcttgcctttagaagtgtttcagccttgggagaatggggaattgtattggcggcagtaagaaatgacataccgcgtaatttacaatctatacccattcgaatatatttaggtctaaagacggaggccggatgatagcgttcgcagtaaatatcattgttatgattgtaataatacgatccaacaactttattccgtatctccagttctccgcaccagccattgaagcccatattattggctcgagctactacttcccggttaccgtcgtcttttatccaatgttgtagtatctcacgaatataataacgaggctttgtttctgcccggtaataagcaatcaattcaaaacttcggataacttggaattcctcacaaatttctgccttgccaataaacattgtctgtttattgatacgcttcctcgactgttctattttcaaagacgtatcacaatgaggacaaacagcacgtttacgttttacaagttccggagcgaagcgttggccgcactccatacagataatacgtgacttggttgcatatcctatatgtttcaaacactcattcttagcccagtcaatcatcaaactctcaatattaggcagctggctactcaaattagtaactctaagctgtaattttgttcttggtctcataagtcttcaaataataaaaattgtccggaaggtatttcctttttctttcctttacgtttattattagcaatctgctccggtttggtcttctcaatagatggtataagttcctttttcttttcaggtcgattagaaacaactgcttttgttgcaggctgcttactaactttgatatcatcctcatcatagtaatgaactgccaatccgaatacttcatcgtcagacatacatacaacactaccaccgcgtttttttgcttctcctatgatatagtcgtaacattcatcaatattcttgtttggctttgcgtaggaagtggcaaagaggggatcattctttgttctctcttccaaatacgattgaataacctgtttagctgattggttttcttttcccatagtatcaatagttaatagataaaggcattaataaataagtcaagctacgaacttcttcatcgcagcgagtaagaattgaggctttcgacgggtcactcatagtaatagcaatatcctcggagggaatattgtttatcatttcgattaaaaagctactcttaaagccaatttcaatatcacaaccagttcgtagagcaacagtttcttcagctgatttacagaagtctaaattatgggctgtaattttaagggaatcaggacaaaacttgagtatcaccagagaagagttttcatcacagaaaacagatacgcgttttaaggctgatacaatatcggttcttttcaatactgcacggttgggttgcttttgagggataacagcacgataattagggaaccggccttcaatcatgcggcaggttaaacggtatgaatcaaactcaaataaaatattagtctgatttactgttatttctacttccatgcaatcttccggaacaatattagaaaggactttggcaaatttacttggcagaatgaaggctgcccgttccttgcgcgtataagcggaaggattctcaatcatcgcaagtcgggtaccgtctgttgcaacaaatgagatattatctaaatctatatcaaaatagactccattcagtaccggacgtaattcgtcattggcactgcaaaacaatacttgccttattccatatagtaagtcatttcctgatacaagtaatggggtagcagtattatctgtactcattgtcgggtattgatctcctttttcaacaggtatagaaaactttccattagcatatttgactaccaattctttttcgtagagatgaatagttaatggctgctccgggatttcttttaatccatcaagtaatgttttggcattagccataaaagaacgatcagtaaagtctgttttaccgtcaatattggtagagatacgcccgccttcttctcctgctgtaactaggatgataccaaattcatcgacgacaaacaaaaagttgtcataggtcggtattgaatttttgggctgtatgattcgcccgattgatttaagcttatctaataaagctgtttttgaaactgtaatttccatgcgtcattgttttgtggcgcatagcgtaaaaatgagatgagtttcagtaatatgaactattgaagcatatatatgcaataaaagccggataaaatcattgttttatccagctcaacaccatttcggttgcaaatatatatagagtttttgtttttgcaaacgtttcaggtctttttttcttcttttttttgcaataagtccaaaacagcacgatttgctttatcacaaatactataatctatatcaatgtagatatcggccattttataatcgttattcacatgaccaaggcagaaatcaatatcagctttaggaactccagccttgttgcgcgccaaactggcccagctgtggcgcgcccagttcgtggtgatcttgaaatcgagttctaagttcatgcaaatgtctttcagcccattattgactgcccgcataaaattattcaagttacaatagttggtatgaaagtaggagaggaaataaccctctgtgtatttatcaaggaggatgcggagttccggttctatttttatcgaaagcggtatttgctcatgattgttccgcgtttttgttttggaacgtgtgtattccagccttccgcgacgttcacatgacatgctatataaatcattgatattgattcccatcatatagaacatcatcataaaaacatcacgagccatattagtacatttcttatcagactgaaaatctcggatttttaataaggtgttggtatctatattctttcgttttctccgatactccgggatttcaactttcttgaatgggtcgccaggaatccttataatatcaaagtcttcgttattataatagagttttgccttgttatacaatgctcttattcccctaagataatggcttaccgtgcctggttctaaaggtgtgccggcaggtccggagtgatataagtctttgatcatcttattcagcatgaatgaagtgataagttttatatctatcttttttcttttcatgtaccaacatagggtatcgatagaagatctgtaccattcggcagtttttctcttttccgtttgaattactatattttgagtaaactctacaaaatctataaactcggcatcaggaactaatgatttttctatttcttcttttaagtccttacatgacataaattgggttctttcttgtcctagcttcaaatactctctcctgatcttttggatatacgcatttatttcgtactctatcatttcactgttaggtacgttgggtaggatccggccggagtcgtccatgttttctgggcggatatagtagctggttgctatatactgggattctctattatgatagattctgatttttatatttgatgttccatcttgttttatatgtcttcctgtttggaaaacgattgctttaaatgttgccatactgttttaatgttttttaaatgtttaaaattgcattaaacagcttgaatcggggtaaattggcgggaaattgctttattttccactaaataggtgcaaatagaaaaacttgttcaaagatagttcaaagaattatcccttttatttgccccaaaatagggtataattgggtctattttgcacaaacaaaaaaagccgatacaaactgtatcagctcaacaccattcaatttttcttgacttgaatttttcgtcggggtagcgggattcgaacccacgaccccctgctcccaaagcaggtgcgctaaccggactgcgctacaccccgaaaaacttttaaccgaactccctctttttttgtagtcggggtagcgggattcgaacccacgaccccctgctcccaaagcaggtgcgctaaccggactgcgctacaccccgctacttttaaagggttgttcttttcaaaagcggtgcaaagatagggagtattttttaattatcaataactaaatgaatgttttttattgattaaattacaatcgactgaaattcatctgtttgcaagtcaactttttttcttggcagaaataagaagcatcattggacgccgaagttcgtcttgcatttccggaatagtatccagcatcatttcactcggttggggctctatcaattcacaaatttcaaatccggtctgaagaagactattaatatatgtagttaaagtcttatgatacttcacgacttcttctcctaaaaaaatagcagtacgtttgccttcactgaagtagcggtctacaggccagtgagcacgttttccatcttggtcgtaataccaatcctgattaccataggctgtgaatatcggatgctctactgaaaaaacaaaagaacctcctgctgtgaggcagctgttgactttacggcatatattaataaaagattccagataatgaaaggtcaaggaactgattacgatatcataagtatccggttgaaagtcgaaatcctcgattgccatacatttatattcgatgagtggtgaagaatttcttttttgagcttcttccagcatcttcccggaaatatcaattcctgtaacacactttgctccatgttcgatggcatagatacagtgccagccaaatccgcagcctaagtccagtactctcttgtctgtaaagtccggtagcattttctgtaatatatgccattctccggcaccttgtaatccctctacagagcgtgacatttgagcatattggctgaagaagcggtcgtcgtcatatttattttctttcataacttcaatgaggttcatattagatgggcaaatatatgcatttatgcgattattgggacgaattaactgaaaataaaatcagataggatgaaccatcttttgctgttttctgttttcaaagtagaaaactaaaaataaaaaagccatatgaaaacggaaaaacaaaaagaaacgaatgaaaaggaagttcatttgttagaacaaaaaggatatgaaagaatggtcaatgagattgttccggtacaacaagcggaaacttaccgtaaaccgacccagaaagcggtaaaagatgctgtaaaggagttgaatcctgatacaaatagtttgggtagcagaggatgattgagtcctctgctattttaagtagacgatcagcaggcttaatgaatattcgggctataccggactcagattagtctattcgtttagtgaaaaaacgatcattctgaaaaaaagaatatttaaacaggcaggaagggctataattacatctgtcataagctaagaatcaataaacgcctgcatttttaaatagggaagtacataatttcattaattgtctgatatactgatcgacttgaactgctctttcccttgttgttgatcattaagctggatgaatggcttaaggataatcattatgctacttcttaccttgcttataattctaataaatcagatgaaaataagcaccgaatcgcctttttatctctttcccattaatgaaaaataggttcctcggtgagcaaggtagcgttggtttaaaaccaacgaggtgttccttttaagccaataagtgttttgtacatacgaaaagatgtatatattatgccgttttatgcaatattaggctgcgttttcgtatattattgcatttatttatgcagtttattttctggtttgttgcttttggtacaataatttttcgacgtaatcttaagaatagcacatcaagatgcaaatatcaaaggctcttatttaggaaaagtaaggataaaactgcttcctttacccacttccgacttaacattaatacttccttcatgcaaagtcatgatttgcttgcataaacttaatccgatacccgaaccggatgttttggtggtaaagaaaggaacaaatattttatccagcacatcgggcagaataccttctccattatcagatatcgttaatgtcgtatttccggcagaaagttttcttgcttttacctgaatcttcttatctgattttcgactgcatgcttcacgggcatttttcagcagattaataagaatctgttctatttgtgttcggtccacatttaatttcagttcgggtgagggaacctcaaactgaaactcttcttccggaaataatttctttaaatccgtgaataattccgcaatagaaatttgtgtacgaataggagcagggattcgtgtgagccgacgatagttctctacaaattccagtaatcctttgcttcttctgtgaatggtctgcatggcttgcagcataacagaatattctttttctcccagttgactggggattcctctctcgcttaatgtttccgaaagagaaatgattggtgtgatagagttcatgatttcatgagtcagcacgcgtatcagcttttgccaggcttccatttcattgcgttccaatacagaatgaatgttttttaaactgattaactgctgttctctaccttgagtggcaaatgtagtgcgtgatatggccatttccagcacagtgctattttgttcgatacggatgacgggggtgtcatgggcaacagaagctttcagcaatgtttccggcaattgtgatatttgtcctaagtgggtaacggccgcctgattcatccattctatatgtccggctttatcggcaacaagcactgccgtatcaactttgttcaataagttctcgtagtattggtgcttgatctcttctgccagcaatcttccccgaaaatcttttaaagtatccgaaagttcttccgcccattcattcattattttgttattgaaaggtggatggaaagtttgcatcatgtcattatagcggaggccgtctgtcaatcgtcgcaacagagcaatttgtttgaactgcatacggtaaagatgtattccaatggttatcagtaatataaggcagatggtagtactgaaccataactgcttttgaaatagcaggtagctgccgatagaaaacaatactatcagtaaaatatgtaaaattactctgaatgcaaatcgtttcataagcctagtttttcaagtttgcgatataaggcaaagcgggtaatacctaaatagtcagcagcacgtgagatattcccttcactaagtttcattgctttttcaatggtttgccgttccagttgttcaaggttcaaaacaatttcttcttcctttttttgcttgggggtgacgtggaactggaagttttcgggttttaataaagaaccgtctcccagtattacgacacgttccattgtatgttgcaactcccgtacattacctggccacgtatatttcagcaacttatttttggcttcccgtgtcaagccacgcatttcttttttatatttgcgtgcataacggtccagaaaatattcagcaagcagaatgatatcattcccacgttcgcggagcggggggatatgtatttcaattgtattaatacgatatagtaagtcctgacggaaacttccttcatccaccatgtggcggatatccgcattcgttgcgcaaatcagacgaacatcaataggcatggtctgtgtgcttcctaaacggctgatctgccgtttttcgatcgcagtgagcagcttcgattgcatgggaagcgaaagattaccgatttcatcaaggaacaaagtaccattggtggcaacttccatccgtccggcttttgacttttttgcatcggtgaatgctcccttttcaaagccgaacagttcactttcgaaaagttgttcggggatacttcccaggtcgatggtaacaaaaggtttgccgtatcggggggagtagcggtatagcagtcgggcaatcacgtcttttcccgttccgttttctcccaaaatcagaatgttggcatctgtactgctaagtttgtttatggttgcaaatacttcctgcatgatcggagattctccgataatatccccttctggagaactttgtccgctgagtgcttctacttgctcttttaagatgtttacctcccgttgagattggcgcagacgcataccggaggtgagagtagccagcaatttttccttctcccaaggtttggggataaaatctgttgcaccggctttaatggcccgtacagctttatctgtatccgcatatgcagtcatgaagatgacaatagcttgcggatcaatctgcaaaatctgcttcagactttcaaaaccttcctgaccgctaattgcatcacggctgaagttcatatctaataagataagatcgggctgaaaggtagtcataaaatgctcaatccggtcgggagtggtagctacctttatcttttctgtataaggttcgagtagtagattgagggcaaagagcacatcttcgttatcatctacaatgagtatctttcctagtttgttgacttcatccatagggtatggggtatatgattcgttacttatcctaaagttttaatgcaagggcaaagatatggataataatcatgtgttgtatgtgcgattgcgcactaaatttgtgcgtatttgcacgctgcttgtaacagcgtagtaaatgtaaataactgaattagaatgaaatataagaatggcacaggttttgaatagtaaataacaaataaacctaagaatgaatctgaaaatactctatataacactcggaatcctgtcgactgaactgctggctgctcaaaatcaaacaatggagatgtcgttggagcaggtggtgaaaatagcccgtctggaatcacccgatgcacgaactgcacgacatagctttcgttccgcttactggaactacaaatattatcgggctaactatttgccatctttgagtttgtcatccgatcctaatctgaatcgtgccatcaataagattacaatgggggacggttccgttaagtttgtcgagcaaaatctgttgaataccgatctgactttgaacctgtcgcagaatattccctggaccggaggttctctttttctcgaaacatctgcgcaacgcatggacttgttcagcgaacataaatactcatggcaaacttctcctgtcatgataggatatcgccagtcgctttttggttataatagtctgaagtgggataaacgtatagaaccggtacgctatcaggaagccaagaaaagttatgtggaaacactggaacttgtttccgccaatgcaattaataaattcttcgctttggccaccgctcaaagtaattacgatattgcttctttcaattatgcaaatgccgatacgctctatcgttacgctcaggggcgttacaatataggcacgatcacagagaatgaaatgctgcagttagaattgaatcgtctgaccgaagaaacaaatcgtatgaatgcccgtatagaaatggataattgcatgcaggaacttcgttcttatctgggcattcaggaagatcgggaacttcgtgtgcgtatcaactcgcaagtaccggatttcagtgtcaatctggatgaagcattggcattggcatacgaaaacagtccggacatacaggcgatgaaacgaagaaaactggaaagtgagagtgctgtggcaagagcccgtgctaatgcgggactgaaagcggatatttatctccgtttcggactgacgcagactgccgaaaagctgccggatgcttatcgaaatctgttagaccagcaatatgtaagtctgagtatcgctcttcctattttagattggggaagagggaaaggacaagtgcgggtagcccgttccaatcgtgatctggtatatacgcaagtggagcaaaatcggacggattttgaattgaatgtccgcaaactggtgaaacaatttaatctgcaaacacaacgggtacatatcgctgcccgtacagatgaaacggctcaacgaagaaatgaagttgcccgcaaactttatatactgggaaaatccactatccttgatctgaatgcttccattgccgagaaagatagtgcccgccgtaattacgtatcggctttgtacaattattggagcttatattacacacttcgaagtatgacactttacgattttgaacggaatatgctattgacagaagattacaatcttcttatagaatagcaacttacttagctttaataaataaaaatataaaatacctgataaagtcatggatataaaattagaaaagaaaccttggtacattcgatacagatactatctgataggcggacttttgtttgctgcctttctgatttatgtaattgttctgtcattaggcccccgaaaattacgtattgatgccgaaaatattcagatagcggaagtgaaagaggataattttatggaatatgtagatgtggagggactgattcagcctatactgactatcaaaatcaatacccgcgaagcgggaagcgttgaaagcatcgttggtgaggaagggagtctgctctatcagggggataccattatcgtcctttccaatccagacctgcttcgcagcattgaagaccagcgtgacgaatgggaaaagcaaatgattacctatcaggaacaggagattgagatggaacagaaaagtcttaatctgaagcagcaggctctgacgaataattatgaactggaacgactgaaaaagagcattgcccttgatcgggaagagtttcagatgggagtaaagagtaaggctcaactacaagtagccgaagatgaatataactacaaactaaaaaacgcggcattgcaacaagaaagcctgcgacatgattcggctgttacgatgattcgtaaagaactgattcgcaatgaccgtgaacgggagcgcaagaaatatgaacgtactcatgagcgattgaataacctggtggtgacggctcctataaaagggcaactaagctttgtcagggttactccggggcagcaggtttcttccggcgaaagcattgccgaaataaaggtactcgatcagtataagatacatacttcgctaagcgaatattacattgacaggatcactaccggactgcctgctaccgtcaattatcagggaaagaaatatccgctgaaaataacgaaagtcgtccctgaagtaaaagaccgtatgtttgatgtcgatcttgtctttaccggcgatatgcccgataatgtcagagtcggcaaaagcttccgtgtacagattgaattaggtcagccggaacgggcgcttattattccacggggtaatttctatcagtctacaggaggacaatggatttacaaagtgaatgcttcgaagacaaaagcaatccgtgtaccattaagtattgggcggcagaatccgcagcagtatgaaattacggaaggtttgcagacgggagattgggtaattacgacaggatatgatacctttggcgatgcagaggaattgatattaaaataaaaacacgcaatattatgaagattatacagttagctatccggaccttatgtaggtttaaaatatatacgattatcaatatcatcggattggcattaagtatggcttgtgtcattattatattccgttatgtggaacaggagcttactgtagacagctatattccggatagagatagaatagcttttcagatacaggaggataaaagttctcccggaagtcgttttgttaccggagctggtttctctgatccggatatagaatgcagttctactgtcttatggtataataaggatgtgattatcttggacaaagaacgcttcgatgtagaaaccattgttgctgatagcaactttgtgaaagtgatgaaatttccggtacgttatggtaatattgcttctttaaatgataatccacaaaacgtcataattacgcaaatattggccaataagctttttggtgacaggaatcctatcggagagaaaattacttattcaacaggtgatccgttgactgtgacaggtgttatcagtatgcaagatagaaaaagttcgatacattttgatcttttggtttcagataaactgcaagaagactgggtcgctacttttccagtcaatgtagtacttatccgccagggggcaaatctgaacacaataaatcaacgtcatgcggcatacgaaacagaaccccggactgaaaaagaaatacgaaatcagttgctatctataaatgacagctattttgattcttctgtcgtttcatacaatgatatgttactacatggaagtcctaaacagttacagcggttgtctttagttgctatccttgtgttgttaatcggcatattcaacttcatgagcctctatactgtgattttattgaagcggggaaaagagttcggattgaagaaaatattcggtagtactccgatacatttgttcgtacaactctacattgagaatttatttctcatagctattgcattatgtctttcctggtttttaattgaaatctctacaggatttattgaaatacagtttggaatggcacaacaaaaagagatagccttcgatggtctgttatctgtcttatttcttctcttgttaccggggattgctgtgatttatccttttttacgataccgacatattacacccgtccgttcattgcaaagtatatatattggaaataaactcactgtggtacgatatctctatttaagtgtccagtatgtcattacctttacactaattgttttgtctttgttttttgtcaggcagctatacgaaatgttgcatacagagacaggctatacaacggataacataatcagagcagagttccagatttacgatcgaaaaacacctacaactaaagaggaattcagagctagtttgagtagaagagagacttcttatagtcagatagatcagcaaatgaatgcttctccattgtttactgcgtggggatataattatcttccatacgaataccaacttgaaaatagcagctttaattttaaaaagccaatggacaatgattataaagcagttgctttgataccttctacagaatctacttcaagactttacgggttcaaactgttggaaggacgtttatggaatgatagtatagaccaggaaggagatgctaaattgattttaaaccggaaagctatgtcattgttcggatttaaaactcttagcaaagctgaacttcaaacagaaaatccgatatggccgcagaaaagtaattcgccctatcaaatcattggagtgatcgaagatttctattgcgggcacctgtcgaaacctatcggaccaatagcgtatatgtattgcaaaacctattccgatcaagtgcctatcgtggcagccatcgttcctggcaagcaacaggaagctatcgcctttttggataaacttcatcacgaaactatggatggaacatttgagtatgcttttgtgcaagatgagatcagtaatttgtatcgggaagaccggcaaattacgattatatattcttctttcgcacttctgggaattttgatttcttcattgggattgttcggactttcattgttcgatatccaacaacgttatcgggaagttgcccttagaaaagtgaatggagctatgatgaaagatattctgcctttacttttaagacagtacattttgatattgggtgcttcgtttgtaatagctatccctttagcttattggggaattaatgtttatctggaaaactatgcctaccggaccgacattagttggtggctatttgctttggcagccatcatcgtcttactaatttcattagtaaccttgatttatcaggtaagaaaggctattgctattaatccggctactattttgaaaggacaatgaaagatgaaaacatcaagtactattatataattttaaaaataatacaattatgatcaagacaattaatttacagaagattttcaagaccgaagaagtagaaacctgggcgttgaataacgtaagtatcgaagtgaaacaaggagagttcgttgccattatgggaccttccggttgtggaaagtcaacattgctcaatattcttgggttattggacaatccgacaggaggggaatattacctcaatggaacagaagtttccaagtacacagagtcacagcgtaccagccttcgtaaaggagtgatcggttttgtctttcaaagcttcaatctgatagatgaattgaatgtttatgaaaatattgaattgcctttgctttacatgggtatctcagcttccgaacgtaaaaagagagtggagactgctatggaacgaatggctatcacacatcgcagcaaacacttcccgcaacaactttccggaggtcagcagcagcgtgttgctattgcccgtgcagtagttgccaatcctaagttgatcctggccgatgagcctaccggtaatctggactcaaagaacggtaaagaagtgatggggctattgagtgaactaaataaggaaggaaccactattgtgatggtaacacattcacagcacgatgccggttatgccgaccgtatcattaatttgtttgacggacaggtagtaacggaagtcagtatgtaatatattcataaagtaccatgattaaacactatttgaaagtagcctttcgcaatttggtaaagtacaagacacagagccttgtcagtatcattggcctagctgttggtttcacttgttttgcgctgtctgtcttatggattcgttatgaaatgacttatgatactttccataacggggccgaccgtatctatatggtacgtgcgcattatactgattcccccagtagtacatccaatgttactccttaccctttggcgaactatttgcaggagaaaatgccggagatagaagctactgcttccacttccatatatcgggatatgaaattccgtctgggagataatgaacaggaagtagtaatggctacagcagattctgttttcatgaactttttcaatatacggctgctgaaaggaactgtcaacttcctgaaagaaaatgatccggaaatcgccattacggaagagtttgcccgaaagcttttcggcagtgaagaggatgctttggggaaagaagtagaactgagcggacgtccccgtaagataggtgccattgtgagcggatggtcccgtcattccaatataccgtatagtgtattgagttcggcaaggcgctatccacgttggagtagtaagggagaacaactgtttatccgtgttcgcgcaggagtggatagggatacttttcaaaagaagatggaagacattgatatcttagatatccccaaagagagcgagcttgcgaaacttctgatcacgcccatttcggctttgcgttattcggattatgtttctaaagtagatgtagtcatctccttcagttatattttctatttctccttagcaggcggattggtcattatttgttccttattcaattacctgacgctttatatcagccggctttgtatgcgtagtcgtgaaatggcgcttcgtaaagtaaatggtgcaagtaatacatctttgtcgattcagtttgccattgaactgttattgattctatgtatcgccctgctatgcggattgttgatgatagaggtgagcatgtctggcttcctgaacttcacacagatagagacaggttcatattatggagagatcattgcatatcttttgattgtaatcattctgtctttcctgttggcacagatgccgttatcttattttcgccgtcggacattgcaggaagcgataaaaggaaaagaggtaactaccagaccttatctgtttcgtaagataggaattatcatgcagttagttgtcagtcttgcttttatcttctgtgcggttgttatgatgaagcaactctattttctgaaaaatacggacttaggaatggaacgtcataatgtcggtaatgtagccttgtggaatggagatataaagcaatggttggggaaaatagctgctttgcccatggtgacagaggctttgcccccttcgtatttcccgattattcctacaggaccgatgatgtatgtcgaaataaacaactgggatgattcgtcgaaagcggttgaagaacctttaacagttggtatgatgcctgctaaagaagaattctttgaattctataaattgaatttattggaaggcgagtttatatcggacaagaatcaagaaaatgaagtcgtgatagatgaaaatacatgccgtaaatttggatggaaacgggctttgggcaaaagtttctatcatgaatataatggtcagcgtagcctatataaggttgtcggagtagtcaggaactttagctatcgttctcctacgagtgaaccgggactgattgcttttcagcatcctaaagcgcaagattatctgttgaatcgtgccagcattctgtttaaatttagagagggcacgtggaatgaatgccgtgcgaccatagagaaactgtacagagaggaatttccgaatgcgtatatgcgattgtttaatgaagaagaggaatataacaagtacctccgctccgaagatgcactgatgaaattattgagttttgtatcattggtttgcgtcattatttctgtattcggagttttctcattggtaacgctgtcttgtgaacagcgtcagaaagagattgctatacgtaaggtgaacggagcgcaaatccatcatatcctgcagatgttcttccgggaatatttattgttattgatcatagctgccgttattgcattccccacaggatatgttgtaatgaggagatggatcgacagctacgtgagacaaacatcgatagatggctgggtatatataagtatctttgttgtgatagctattattcttttgcttagcatcatttggagagtatggaaagctgcccggcagaatccggcagaaattatcaagagtgaataacataaacacaatgtcatgatatatcattatttaaaaatagcttttcgcaatctgatcaagtacaagacgcagagtattgtaagtatagtcggcttggcaattggtttcacctgttttgcattgtctgccctatggatacgttatgaaatgacatacgatacgtttcatgaaggggcggagcgcatctacttggcaggtaacaagtttgaattgcagggggacggattttcctactattcatcaggtttattggctgactatatgatgaagaattgtccagaggtggaaaaagcttgtcatttatctaaagagggtataaaacctattgaatacgagaagaatatatatcatacatggcagttggaagttgattccaactttatttcggtatttaatatcacagtgatagacggggacaatcgtttgcaactgggcgataaacagatcgctattacagataaaatagctaaacagatattcggaaaagaatcccccattggcaaaagcttactatttcctaatagaggaaatacagaaatgatgatagttgcagtggtgaaatcatgggaaggacactctttgtatccttttgacatcttattgccctacaaagatgaagatccgaattggggtagacagcagtgcaatactcttttccgtatgtatccgaatagtgatgtgaaagcattggagaagaggctaactgagtatgaaatccaacaagactcacataaacaattaataacgactcctattgctctattgtcaacattgcggagtactcatccaagagaagatgttaatgtcaaattgaatcatgttcgtctttttgcttgtattggcgctttggttattatttgtggactgtgtaactacttaacgatgctagtaactcgcattcggatgcgcaagcgtgaattggctttacgaaaagtgaatgtatcttctaatactagtttgctattattacttctttcagaattgattttgttacttctgatatcatctggaatagggattatgttaatggaattaattctgcccatttttatatcgctatcgcaaataagtgagaatacttcatttttttataacgaagtacttgtttacatattgtctttgatcatactaacagtaggtgtcgctactatacttatatactatatcaacaaacaggctttgcttgaaaatatcaggcataagtctaatcttcatctttccggttggttttataagggcagtattttgtttcaattatttgttagtctaagctttatcttctgtactttagtcatgatgaagcaactaaactttctactaaattcaagggaactcggattggaacgtcataatgtgggagtgatagtttatgcttcgggttgtgagaaagctactttagcacaaatagtaaaacagacccctgatatagtggaacatatggaagagttttatacccctattccaaagtttttgtattctacttttagagtgagcgattgggaaggaaagtcagatgaacaacaaacttttaatatggaagatgaaactattaatcagaattttgccgacttcttccatattgaagttttagaaggtagtatgctggatgataaagatgaaaaaggagctgttgtcattaatgaggctgctgtcaaagctttcgggtggaatgcaccgataggaaaagagataaacggagaatatagggtaaagggtgttatcaaagatatatattataatgctcccatacatccagtgtctccggcaatgttctctttacaaaagaataatgatagggggcatctaattttcaaagtaaaggaaggtacatggaataaggtatcacagaacctgcaagaagaagtacataaagtcaatcctgatgcgatattagatttgattaatatggaagaggcttacaatgattatatgaagtcagaagatacattaagcaagttactgagtgttgtttctcttatctgcatcgtgattgccgtatttggcatattctccttagtgactttatcatgcgaacagcgtcgaaaggagattgccattcggaaggtaaacggtgcaagtgttaaagttattttgaacttattctttaaagagtatttgcttctgcttatcgttgcgtcattcatcgcttttccattaggatatgccattatgaagcactggcttgaaggatatgtaaaacagacttcgataaacatctggatatatgcaggaatatttgtagcaatgcttcttattatttttataagtattatctggagagtttggagagctgcccgacagaatccggcagaggtaattaagagtgaataaaataataaataatatacgatgatacgacactacttaaaaatagcctttcgcaatttgataaaatacaaaacgcaaactataataagtattataggattatctgtcggatttacctgttttgctctttctacgttttggatacattatgagatgacttatgatgcctttctaaaaggatcggagagaacttacatattatataaagaatcagtattagagaattccggtttcgatacttcgtctccataccctttatctacttatttgaaacgagactttccggaaatagaagcagcgtgtgctttgacgagatggcaaaatgtagaaatctcagtggaaggacagtcacctttggaaggtattgagataggagcagattcttgttttatgaatatgtttgatatttctgttgtatcggggaatacggattttatgcactcggatgagaaaatagccttaacaaaggatatggcgatgcgtctgttcggttcaacggatattttaggacagaaagtgaacttaagaggtagctctcagactgtatgtgcaattcttgatggtttggaagatcatagcaatctgtcattcggcttttggacagaaggtgcttattttagtagttggaccgaagactggcagaattcaggcttcatgacaattctcagattccataagaaagtggatcttcaactttttcagaagaagcttaacgaatatgctcaggaaaaagagaaggaaaatatatttattgggaaatatcgattgatgccaatcacaggttattattattcagctctaaatacagaaaggacagtcgagttttattacctgattctttttgcggtagtaggcggattagttatattgtgctctcttttcaactatttttctttattctttgcccgtatgcgtatgcgtgtcagagagttggaactgagaaaagtgtgtggctcttctcatatgggactatttatattactttccgttgaatacttgttgatattgttattgtcaggattactgggaatgacttttattgaactttttctatcagtattcaaggaagtgtcaaatatcagtggaaatatttacgtagaatctttcttctatctgggaggagttgccattacttccttaattttatttctaccgtttattgtaaagaagaattatcattcccgaaagacagtcggaaaagctttgtaccgtaaaatcagtgtcgtgcttcaactgataattagtattctttttatattctcagtaagcgtcattatgagacagctttttttcctgaataatgttgatttaggttgggagagaaagaatatagcagtttttcaatatctgtatccgaatgattcttttagtgccatagcggataaagtagaacaaatgccatgtaccagggaggtactgaaaggaaattatggcttattgcttcagggagtaagaatttcatggcggataacagactgggatggaaagcaaagtagcacagatcagacaaatttggaatgtctggcagaaaatgaagaaataatgcgattctatcatttaaagctactgaaaggagaaatgctgaaaaaagatgatgttgataagattgtaatcaatgagactgccgttaaatctttggatatgcatgatccaataggaaaaaaaatataccagggaaaagacaagcatgagtataccattgtcggagtcattaaagactttcataccagcccacctacaattcctgtaaaaccggtagcttttataggtcagaataacgaactctctgacagaaagcagattatagtcaaatatcatgaagggcaatggcaagagctaaagcagaaaaccgaggatttatttgccaaagaatatccgggagttgaatatgtattgaccaatatagaggaacattataatgaatatttaaaatcagaatacattcttcttaaattattaggctttgtaagtatagtctgcgtgattatctctattttgggtatttactctttggtgacactgacttgcgaacagcgatccaaagaaattgctattcgtaaagtgaatggagctataattcgggatattctgattctgttcctgaaagaatacctgatattattgatcgtagcgtccctcatagctttcccaataggttatatagctatgaaacattggttggaaagctatgtagaacggacagagataagtgcctggatgtatggagctatttttatcattgtagggcttattatattcttcagtattataggcagagtatggaaagctgcccgacagaatccggcggaagtaatcaaaagtgaataacatccttagtataaaagcaatatgaagaaccaattatctgctatcaggactttatcccgtttcagaatatacacgatgatcaatattatcgggtttgcagtcagtgtggctgcaacgttgataattgtacgctatatccatcaggagataacagttgaccatttctgtaaggacctggaccgattgtacttgctgactattcaaaggagtaatggcagcatttcgatcacagataatacagacaggaataatgatcctaattttatagaccctttaaagaatccggaagtagaagcatattcttatagtgtttcttttgacgatgattatattgtagtcgataatcaccgttaccgggccaatgttttggtaactgatagcttgcttttgcagttgatggactatccgatagcttcgggaattaaaactattcagaaaccggatgatgcaattattacccggaaatatgcccggcatatttttggtgacgaagatccgatagggaaacaattaacttcatcatcaggttctgtacttaccattcgtggcattgtggatgaaccgagtaccaaggcatctttgcaattcggcctgatagctccggtgaatcagggaaaatatgcagactggagtcgggtgggattctgcatggtccggctggcaaacggaacagacctgaaaaagtataatgaaaagatttccaagccgcagtcattaatatgttacagtcattcccctatacagtatgggcttactcccttgaaaggattgtatttcaataagattgtcgaaccttcgggaacttcttttttgcgagggaatatcaaccatgtgatgattttgactgtagtggcttgtatgttgttgttggtgggagtctttaattttatcaatatctacacggttatcgttctaaagcgggcacgtgagtttggtgtaaaaaaagtatatggtgcgagcggctttcagatatttacccagatttatgtagagaatatatatatggtggcagccgccttgcttattatctggatgctgatcgaaacttcagccgggatattcgcctcggtatatgcaattcctgtaaaaccggatatcgtttttgatctgtcgctgtctctcattttattattcgtgttgccgttggtgacgtctgtctttcctttcttacgttacaactattcttctccgatcacctctttacgttctgtaaatgccggaggaaattcaattgtttcccgtgctgtattcttatttattcaatatgtcattacgttcagtctgatagtagtcgcactgttttttgttcgccagttgtacacaatgctgaatgcggatttaggatatcaggcaaagaatatcatttcatgccagttcctgtcattcgagacacaaaacagaagatatgcaaatgatgaagaatggcagaaagaacgtgacttggagcggcataaaatacaagttatcaaacaaaagatggatgcatgccctttattcatttcatggggatatggtgaagcccctatcaatctggaaccatacgtcaatgtggagagtaacggagagaaacataaaatggctatcatgtatgttaataataattacatggatatgtttggcctgaagctgaaagaaggaagaacgtggaatgataaagaccagtttgcccaatataaaatgatgataaatgaaacagccagaaagctcttccggataaaagatattaatgaagcttcactgcaaactgagtcccgtctatggtggagtgtggggacagatgaaagtaaaaatcctgcttatcaggtagtaggtgtgatagaagacttccggaccggacacttatctatgggggatgcaccactggctattctgtatgatgaaggagaaaaccctaccgaacctttaatggctaaaatagccgaaggtaaacgcaaggaagccgttcaattcttgaaggaactacacaacgaagtaatgggtgagggggagttcaattattcctttgtcgaagatgaagttgaaaagctgtacgatgatgacaagagaatgacccgcatctacgtcacctttgccggattggctatctgcgtttcctgtctcggactgttcggattgtcattgtatgacattcgccaacgctatagagaaattgcattgcgtaaagtgaacggagctacaggcaaacagatcactttgttattggtcaggaagtatctatctattttgggagccgcctttgttgtcgctattcctttggtttattatattattaatgactataccaaagactttgcggtgaaagctccgataggagcagggatttttgtgacaggcttcatccttaccttgcttatctcactgggtacattactctggcaggtacgcaaagctgtccgcatcaatccggcattgatcatgaagaacgaataagattaaaaacgactaagattacaacgaatggaacgaaccgctatggaaaacctcgtactattaaaacttatattcagaaactggtggcgcaataaactttttgcggtcatctctttggttagtcttgtggtcggtatttcctgtaccaatcttctgatttcgtttgtcatccatgaatatacgatagaaggggaaaatccaaagaaagaccgtatcctgcgtctgacccagcaactaccatccatgcagagcaccggacaagtatcatttgtctacggaggatcggttgccggaacgatagctccgtttctggagattgaatcttatctccggctgaccgagaaggaagtaactcatatcgaaattgagaaccagcactttcctcaacaggtcattgttgaggccgacagttctttctgccgtttttttccgtaccagatattgtccggcaatatgaaagaagccttgaccaagccggactgtattgctttgagtgaagaaaaagccatgcaatacttcgggaagatcgattgtatcgggcgggaactgtctttggtatatggagataaagttgaaatgaaaagggtatctgccgtatatcagttttatgcgcagtcagccctacgtattgatttgctcggtaattctcagaacctgcaggaagaaggaacttcctgtatgattcttctcaaagaacggactgacgtgtcagcctttcgcgaacgttttgagtcaacagaactgcctacagtgacaggtcccggatattataaactccagacattgcaagaatcctacttcgacacaaaactggctgattccgtgaaaacattcagtcaccggcagatcgctttattgagtatcggtttattatcagcctttctggtcttattcatcgcttgcttcaattacgtaaacctaagcttttcgcgcctgctgaaacaagtaaacatgattcatgtagagacattaatgggagcttctcattcatatgtttgccggcaactttttatcgacacattccttactgtatttatcgctttcatcctttccattcttgtaatgggggacatactttctcttttcaattacttttttgatgcctgtctgactttcggtttcattctttcatggaaagtctttccatttattcttttgtttgtttttcttttggctattataccggccacctatatggcgaagaaactgaaccgcatttctatcagcggatatcggcaattctttcaagggagaaaaagaagaagactggtagcgatccttgtaggcgtgcaaatggttatctccatcggattgatgactgcctttatgatgatacgctctcagctttcaaccatagaagggcagggtgaacgctttaaaggagttataatcttaggtaatgaggggactgccctgactatccctttgtataatgacattaaagacctgcccggcatccaaactgccctgttatccaaagggcggataacgagtccttttaatatcatcattccactaaacaggaacgggcaggaagtaatggtaaataaagttttattgaccgagaactatgaactgctggacttattcaacatagaacttctcgaaccggaacgaacgaaggatttattttccaaggtaccccatccggtagttgttaatgaagcctttgtacagttctttgtaccggcaggagaagatccggtggggcagaccttaagcaaatatgcgcaggacaacgccggtgaaggaactattatcggtgtgtgcaaagatttcagactgacttctttcaactctgccattactccgatgcagattattcttcaagagattccggtcgatcaggcaacctacctgtcttgtcgtatagatgagggcagacgcaatgagatagtaaaaaatctccggttgctgtgggagaaacacgagccgggacattcttttgtttacatagacgcctatcagcaatatatatccaacaatacagatatggtgaatttctcccgattattactggcttatgctataatcagtttattcctgacactttttggtatctttggaattacatggtatgcggtagaacaacgaaaaagagaaattgcgattcgtaaagtacacggtgcctcttcccgacaaattctattgttgttgaatcgtccgttcttctattatattctgatagccgatgtgatcgctgtccccatcgtatataccttgatgaaacggtggagggaacagtttgtgtatcctgcggattggggaatagaagtatttatagtacctgtcgtcttattgatgcttgtaacttttggtacagttgtccttaacggatatcatacggcattaagtaatccggctgagactattaaaacggaatgatcactatgaatatgtagttcttcagtatccagtttctaagaagataaaacggtcttcctttgccgtcgactttgaagctaatcaaccgttggaaaaacaggaaaggtggcatcggacaaaataaaaagctactctctttggggggaagagagtagcttaacttcaagatgcactatagagtgcacttgctataaaatacctatcgaatgctcatgtgtcagttaataatagtgcccttgacatctagttctctgatagcagcgacagtactgtttcctccgtcatcgggaatcgtgagtctgatgtaacgtgctttgatcgattttacataatattccagggcggcatcctgattcgtgaatccgaatctgccgataggagtccagttcacgttatcttcactagctgcaaactcgaccactttgataggattgtttgaacctctgccgcgcggaagcaattccacctgtgctatttgtatgttttgcttcatatctatcacaatatcatacggtagcgggtcgcttccaccttgccatttggcatgccagaatgtttcagtgtctccgtctatcagacatttggctaatccattgccggctccttctcccgaagcttcctgtgtcgtaaaggacagaacttcccagccgctctttgatattttcgttccttcttttatgatgcagaatcctgtgtaggtgtctttatccgcacggatagtggcatcggaagtaacttcgcctatttgtacaggaagcatataatttcccggaagaatgttatctttcagcttgtaactgactgtggtctgatcaactccctgagacaatgacggggattcgggtttggtatagcactctgccggcagaagactgaaataagtctgattggcactgttgtacgtatctactaccgactggttgttgactaaagtacagttgatgttccatttattgctaaaaggtactccaatggtaatcggcaactcttttacattgtcgacattgatttcctgtataccatcgtttatgatagttacaatgggttcggaaactttaaatcccagtaggagggtggaacggtcggggttcaacttctctcctgtagtgcttgctttgagtgggagaatgtattgaacattgtcatagccgcacaacgcatgaatctttgtcgggtcgtatacgatagtgccttttgccagtctgtcaccggcagatacgttaaccgttgtgttagtcatttgataacaatcttccggaagtatctggtaactggttccgtcggcagtattgagtgagtcgagcaggcttttgtctacggtgaaggtgacggtactgttattcagttccagtcctccgtgttgtatccataagtcagcattgtatttttctcctacattatacgattgcagaatagtcagtccgttttcagacaatgacaaaatcccttcggatgtattgctcgtatcaaaggtttcatcacaaccgataatagagagagtgatgcaacctgatattagtatataacttatttttctcataatgctcattgatttattgtgcttatacaattaccatcccggattctggacgaggttttgtgtctttctcatttcgtgatccggtattggctgtaagtacatctttctgttgaatacaattttttcagtttccactacgcggttgaactcttcggtatcattgatagttccccgaacattcataccgtgtgcatatccgttctggcgtccttcaccgtctttgtcggcaatcatccagcggcgtacatcgaaataacgttgaccttccgttgccagttcaatctgacgttcgcgctgaatggctgctctttgcaattctttattacctacgataccgggattcagtatttctactttcggcaagcctgcccgttcgcgtacgaggttcagataagtcagtacgcgtgagtcgctcggatttacttcgttggcaacttctgcatatatcagatagaaatccgccagacggaagattatggaaggacggttctgactagctacacccggactggttttgctgattgatcggttgaagcgcttgaaaagcatatatccggttgtagtggcttgtccttcctgaacgcctgcattacctccattgtagaactggacttgtttacaggtgacaggccattggcgtccgttgaagaagacagtgttgtagaaacgtgcttcacgattcagatagcggttactgactgttacgttggtgtagttcttagagtattttccgtcattcttgtccttgtaagttccgtaaccatcttctttataaagtgttgatttcggcagatagtcggtttccttgataggaagtccgtcgttcatatagaaggcgtctacgagttcttgcgttactccggtcgaacccaaaccgttcttttcgcagcgaggaacgattcttcggtcgaatgcgtcaccgtcaagtcctccccagtcgttgttggcggtgccccagatgatttctttattgtatttctgaaagaggttgtaaacggaggcatctacgtctagaatctgttcaccggtgctgcttgttgtatattctttgtataactcgtagcggtttccggtttctgcgtaatcgatgaaatctttgcaggcgtttaatgcagtattccatttgttgtcatcacgatccgggaagagtcttgtaccgtctgggttggtcagagacagcgcttctctgtatcccccgttgagaagggggctggctgcatatagccacaatttggcacgtacggccaaagcgacacctttggttggccatgcgcggtaagattcattttcgtgcatcggttcctgtggcagttcattagctacttcacgtagttcctgatcaatatacgtgataacttcatctaccgtatttctgggaacatcctgagtctctgtcgcctcgtataccttatcttttacgaggataataggaccgtattgttccaatagcagataattgtaaaatgcacgcatgaagcgtacgttggcacgcatctcattcagttcgtcttcttccagtctgtcgccttgcgtaccgctagttgtaatcacatgagctttctctaggaaaatgttagcctgccggatgtatttatagcagtcgccatagcggtgaaaaccagcggtcgccgcattcttgtccgagttgttggccttggcagcatttccataacctactactagttcatcgcagattgcagcccacggatttttaaaggctcctacattcaggctgtttattcccgaataatcggggattcctgcaaagacattggcataccatcgtttggtataggctacgttttcaaatatttgatctgtattttgcaagcctcctgacatctggtccgaaacagccagataatcacatgaactgacggagaagaataatcccatcagcaacatatatatgtgacttttacttttcatatttttatcttttatggtttttagaatgtgaaatcaagaccgattgtataggttcgcggcagcggatagttaagtccggcattcgcatttccggcttccggatcgaaatatttgatatgatcccatactgccaggttatatcccatcagatagatacgggcagcttcgaagccgatcttgcttaagaatttcttaggtatctgatagccgatttctatattcttcaatcggaggaaagagccatcgcgcagccaccatgtattggcaacgcggttattagcattgttcgcattgctcttgtgcagacggggaataattacatcctggctcggattgttctctgtccaacggtttaatgcaaaggtgcgatagttggactggtctacaccccatgagaatgggtaccatccttcggaagtctttccacccaataatacagaagtgttccctgctccctggaagaagatgctggcgtagattcctttatattcggcatttaaaccgaatccgtagataatttccggaatttccggatgaccgattcctcttacacggtcataagagtcgatgattccgtctccattgacgtcggtatatttgatgtcaccgggaccaaggagtccgcctaaggttggttgtggaatttccgaacggagtttataagtcttcagaccgttagcgttagtgcttacggtaaagtcgtcttcggtataaagtcgttctgcgatgtaatagaggttatctttatcactgacacgtttgcccgtaatagcctggtaatcatactttggaggaagttcatcatattccagaattttattgcgggtgaatgtgaatgtacctcttgcgctaagttttaccttgcctatattttgatgagcgttcacagacatgtcaacacctctgttgcgaaccttaccgaagttttgccacggatcgtctctcagaccgccaagttggggaacagtctgacgttgcagcagaatctggcttctggtagaatcgaagtaatcaaagataacttcaagacggttgtcaaacaagccgatatcgaaaccgtagttttgtttgtcttctacttcccatcccaagtaaggagctgcaaaacgtccttctatgataccgttgccgataccgttcagaccgcctccggtatcattgtaaccttgtgtaaaacctccggcatccattttgtaggtcggacggtacaagaaacgggttcctcctgtattgtcgttaccggcacgtccgacagaggctcttaatttgagtttggggacatactttttgatcacttctgggtagaaagactcattggaaatgtagtaggcgagacctactgccgggaagaaaccgaaacggttgcccgaagcaaatgcttctgaaccggtgtatccgaagttgccttcaatgaaatagcgtccgccgtaaccgtaagttaaacgtcctaccagaccttgcttacgatagggaagtgctacattgtgatattgggtttccttttgcatgtacaatagcatggcacccacttcgtgctggtcgaacgtacgtttatagttgatggcagcatctatgtaaatcttcttggttgcgcttgtcgcactattcttagggtcctgcaattcagggtttccggatacgactgtggcaaataatagattgccgttttcatcgcgtcccgtagcatgatatcttgtcggattatattcacggcgaacgatcatttcactatcatagtcataacttgcgttcaggcgtacagacaaacctttggtgataaaatccagtttctggtctacataaactttggattgaatggcagtacggtattctttggcgtatccggagttcatcaataagttgtacgggttgcgcatgttagcgtcacgttcctgtgagtaggttgaaacagtaccatcactgtacacagccggaaatgtataaggaggagtaatcagcatggaacggaatatattggcagttcctgttcccggataattattaaccagatactgaagtgcgaggtcaactcctacagttgtagtgcttgatacgttcatatcaatatttgaacgaagattgatacggtcgatgccgatgtttgtattatattgtttggtaggacttcctttgaaaataccactttcgttgtaatatgctgccgaaacaaagtattttgctttttctgtacctccacgtacattcaaggtatatctgtgtgtgaatgtgtttttacgtaacattttgtcgatccagttggtatttggatataggtccggatcgtcattgttccggtaatgtgcaattaagtcatccgaaaactgcggtaattccccatcattatggcgtgcttcgttgaacaggtccagatagtcggccgaaccaacgaattcgggaagacgggtgggggaagaaatggtgtgttctgtcttgaatgaaatctttgccttctctacacgtccgcgtttggtagtgacaagtactacaccattggctccctcggcaccataaatggctgttgcagcggcatccttcaaaaccgaaaacgtttcgatttcgtcgggttcaatatcactcatgcttctgggtacaccgtccacaagtaccagtggagatgtaccacccgcaaaggtacttacgcctcgaatccaaaactctgcgttatcatatccgggttcacccgaacgttgtactgcaatcaaaccggcgacttgtccggcaagactgttattcaggcttcgcgaagggacaacgatatcctttggtttgatggaactcatagaaacgactacgctttcctttttctgctgtccgtagccgactactacaacttcgtccagcgctttggagtcttcgttcagcatcacattgatgttgcggcgcccttttacttttatttcttcggttacgtatccaagatatgatacttgcaaaattgcattgtcggaaggaatcataatctgataacgtccttctacatcggttattgctccgacgtttgattgtccttttactacaacattggctccgatgatagattctcctttgctgtctgttactacacctgttattttaatcttattttgttgcgttgtttctgaactctctatgccattcatcggcttttccgcattgccggcatttatgagtggagaaaaacataaagaaaagaacagaacaccgattcgcgcggttgtgtgcactttgtttgaagtaaataaaatgtttttcataattttgattttaaaataataactagtttaccggttttgtttgtaaacgatagggatggtaaatcataatactgtaatatttccataggcattgattgtgtgttgatttttgattaaaaattaggttgtgaaatatagaatttagtaaactctaaggcggtataagttcatggagaacttggtgggatgagtattatgagtacatattaatttcaaatacctcctgaaatattactttatcagaattataaaaggaaaagatagggtaaacgaagaaataacttttaaaaaaagcatcaatttatagcgtatttctgaaaaatataactatttttgtcgccaacaaagcaaagaaaatcattcaatatttgtaaaccttaaattttcaaaagatgaaagcttatttttctaaaatctgctaccaagttctccatgaacttatctgaatatatccttaatttatctattatttatctgattattaatatattgtatgtttgatcggaatgagctaaaatagtatttaacatattcctgttttgtctgtcttatccttattttacgttttgtataattatatatgtatcattattttgtaatgagcgtgtgccggtatagaaaaacttttaatgccttatttcaattaattttaagcaggttcatgggaaaaacaattttaaaaattacctttgcaatattctaagttttatctcaaataaaaagcatatgaacaaaatgagagtttttttattgtttgctgttttggttggtgtgataagtgcttgtcaatcaaagagcgaacagactgcgggacaagagcaggatactatggatgatagtctggctgttgctcctacagaagatgagaaaacaatcttcggggtagtagaagatgcttcgatgaataattttatgttggttacttcgaaaggagatacagtgttcgtcagtacgatggatcaggagccgagtgaagtcggtggcttcgaactgggagacaccgtacaggtgaattacatagaagaagaggaagagccgggatcgaatacgataccaactgcaaagaaagtgattgtagtagggaagaaggcggatcggactaatgactaattaataatctaatcagaactacagaatgaaaaagaaaatgttggcagcaactctgttgatgggtttattggctgcatgtggaggtaactctgcctcaattgttggctcatgggtagaacctgtgccgggactggaaggacaagtacaaggtattaagatggaagaaggaggcgttgcttcttctgtcaatatggctactttggtttatgaaagctggaaacaggaaggaactaaactgattctgacaggaaaaagtatcggtaatggccagacgattgaatttgtggatacgatggatatcaagagactgacggctgattctttggttctggataaccaaggaatggaaattcgttacgcaaagcagaagtaatttgtttgctgtagaattaaaaaagctactttcctgatgatttgtctttcggaaagtagcttttttatagcttttcagagatgctgcttacaaaaggtctaaagctttgaaagctttcactaacttttctacagcactgtctatttgttctttggtgtgagtagccatcaatgccacgcgtaccaatgtgtcttgcggagcacatgccggcggaataaccggattgatgaatacaccttcgtcgaaagctaacttagtaaccatgaaagtcttctccgtatcgcgtacataaagaggaatgataggagactcagtagcaccgatctcgaagcctgcttcacggaaacgtctcagagcatagttggttgcttcccacagagcgttcagtctttccggttcattctggatgatatgaagcgcttccagagcagctgctgttgcagccggagtgttggatgcactgaaaatataagtacgtgcattgtgtcgcagccagttgatgatagaagaatcagcagcgataaaaccgccgatagaggccagtgacttactgaaagtacccatgatcaggtctacttcgtgtgtcagaccgaaatggtcgcatacaccacgtccctgttttccgaatacacccaaaccgtgagcttcgtctaccatgatagtagcattgtatttatgtttcaggcgaacgatttcgggtaggtttgccaagtcaccttccatagagaatacaccgtctactatgatcagtttcactgaatccggattgcacttctgaagttgcttttccagatccgccatatcgttgtgcttatattttaattgctgtgagaaggagagacgacggccatctacgatagaggcatggtcacggtcatcacatattatataatcatttcggtcggtcaggcatgagataactccggaattaaccgtaaaaccggtagagaagcaaagtgcttcatccttgccaacaaaggctgccagttctttttcaagttgaacatgaagatcgagcgtaccattcagaaaacgtgaaccggcacaaccggaaccgtatttgcgcatggctttgatacctgcttcaatcactctttcatctcccgtaaggccagtgtatgcattggacccgaacattaacacatgttgtccgcccatttctacttctgtaccctgctttccctcaatctcacggaaatatgggtaaacgccctgtgccataaatttctgtggcaggtcgtacttagctaacttctcttgtaataatcccatgaattataatttattatactcatactcagatcattcgctgatgatccaatttccttttatcttaacaagtgtttaaaacagggggcaaagataacaaaatttgcttttatctgttctttttaaaagaaaaaagttgctcccatgagattagaaacctctaatagatcaaaatttaatatatttgtattacttttgtcgtctacaattgacaaagattagcatgaacgaaagaatgaaaagaataatattcgtcgtcaatcctatttcgggaacacaaagtaaagaattgattcttaacttgctggatgaaaaaattgataaggcgagatacacttgggaagtagtgtatacggaaagagccggtcatgcagtagagatagctgccaaagctgcggaagagaaagctgacgtcgttgtggctatcgggggggacggaacaattaatgaaatagctcgttcgctggtacatactgataccgcattgggaattattccctgcggatcggggaatggactggcgcggcatctgcacatacctatggaacctaagaaggcactggaagtgctcaatgagggatgcttggataccatagattatggtaagattaatggtacggactttttctgtacctgtggagtagggtttgatgcatttgtcagtttgaaatttgctcatgccggaaagcgcggactattgacttatctcgaaaagacgttgcaggaaagtcttaaatatcagcccgaaacatatgaactggaaacggaaaacggagtcagcaagtataaagctttccttattgcctgcggaaatgcgtcacaatatggaaacaatgcatatatagctccacaagccacattgacggatggtttgctggatgtgaccatcctcgagccttttaccgttttggatgtaccctctcttgctttccagttatttaataaaactattgatcagaacagccggatcaagacattccgttgtaagaagttgtgtattcgacgggctgtgccgggagtcgtgcattttgatggtgacccgatggagacggaggcggatgtaaatatcgaacttattaaaagcggattacgcgtagttgtgccgaagacagaagaaaaagatgcggccaacgttcttcaaagagcacaggaatatgtgaacggaataaaactgattaatgaggcgattgtggacaatataacagataaaaacaagaaaatattgaaaaagttgacaaagaaagtctgaaataaatgccgatttctgatttattgtgtacttttgcaagctacttaacgaaaaatatcataaatattagaaaatatgttcagaacgcacacatgtggagaactgagaatctccgatgttaataaacaaatcacgctgtctggatgggtacagcgcagccgtaaaatgggaggtatgactttcattgaccttcgcgaccgttacggtattacccagttggtttttaatgaagaaattaatgctgaactttgcgaccatgccaataaactgggtcgtgaattcgtgattcagatcacaggaacagtgaatgagcgtttcagcaagaatgcaaacatccctaccggagatattgaaattatcgtttccgaactgaacgttctgaacaccgccatgactcctccgtttacaattgaggataatacggacggtggtgatgatatccgtatgaaataccgttatctggatttgcgtcgtaatgccgtacgctctaatttggaattacgtcataagatgacaatcgaagtacgcaagtatcttgatagcctgggctttatagaggtagaaactcctgtactgatcggttctactccggaaggtgcacgtgacttcgtggtaccttcacgcatgaatccgggacaattctatgcacttccgcaatctccgcagacactgaaacagttactgatggtttccgggttcgaccgttatttccagattgcaaaatgtttccgtgacgaagacttgcgtgccgaccgtcaaccggaatttacacagattgactgtgaaatgagtttcgtagaacaggaagacatcatttctactttcgaaggaatggccaaacatctgttcaagactcttcggggtgttgaactgaccgaaccattccagcgtatgccttgggctgatgccatgaaatattatggcagcgacaaaccggatttgcgtttcggcatgaagttcgttgaactgatggacatcatgaaaggtcatggtttctctgtattcgataatgccgcatacgttggcggtatctgtgcggaaggggctgcaacttatacccgtaaacaactcgatgccttgactgaattcgtcaagaaaccgcagattggtgcgaaaggtatggtgtatgctcgtgtagaagcagacggtacggtgaaatcaagtgtagacaaattctatacacaggaagtgctgcaacagatgaaggaagcatttggcgctaaaccgggtgatttgattctaattctttccggcgacgacgtgatgaaaacacgtaagcaactttgtgaactccgtttggaaatgggttcccaattgggattgcgtgataagaataagtttgtttgcctttgggtgattgacttcccaatgttcgaatggagtgaggaagaaggccgtctgatggctatgcaccatccgtttacacatccgaaagaagaagatattccattgctggatactgacccggctgctgtgcgtgccgatgcttatgatatggttgtcaacggcgtggaagtcggtggaggatctatccgtattcacgatgctcagttgcaagccagaatgttcgaaatccttggtttcacaccggagaaggcacaggctcagtttggcttcctgatgaatgccttcaagtatggtgcacctcctcacggtggtttggcatacggtcttgaccgttgggtgtctcttttcgccggtctggattctatccgtgactgtatcgcattccccaaaaataactcagggcgcgatgtaatgttggatgcaccgtctgaaattgatcagactcaacttgacgaactcaacctgatcgttgatatcaaagaaaataagtaaacgatgaacaaatatcgttctctttataataccaccctgtcactcataattaatttattattagtgatggggtgctttattctctgtcgtgtcatctttctgatagaaaatttgaaggctttttccgatctttcagccggacgaatctggagaatgttcgagggaggattcctttttgatacttctgccattctttatacgaatcttctgtatattttcctaatgctgattccgcttcattataaggaaaatgtaatatatcagaagattacaaaggggatttttgtgacaaccaatctgattgtcattattatgaacctgatggatacggtttatttccaatatacccatcgaagaacgactgcgtccgtattcagcgaatttaagaatgaagggaatctgggaggtattatagggacagaattattgaatcactggtatctgacgttgtttgccattgcttttggttatgctttatttaagttgtatcgtaagccgaagccggtaaaggtagaacgtatgccagtttattatacggttcatttgcttactttggggcttggagtgtacttgtgtatcggcggaatgcgtggcggatttactggcatggtgcgtccaatcacaatcagcaacgccaataagtatgtagaccggccgatggagacggggatcgtactgaatacccctttttctatcttccgcacgtttggaaagacctcatttgccatacctcagtatttcgataaagagaagatggaagctttgtacacgccggtgcatatgcctgcggatagtgtgcaattcaggccgttgaatgtggttgtttttattctggagagctttagcaaagagaatagcggctttctgaatgaagaactggacaatggaacctataagggatatatgcctttccttgattcgttgatggctgaaggtctgacttttaaatattcattctctaatggtatgaagagtatcgacggaatgccttccgtattgtcgggtatcccgatgtttatagaaccgttctttctgacaccatcttctttgaacacggtatccagtataggcggggagttgggcaaaaaaggatattacaccgctttcttccacggggcggacaatggctctatgggatttgaagcttttgcacgtacggcagggtacaccaattactttggtcgtacggaatataatgaggctaatccgggtaacaaggattttgatgggcattggggaatttgggatgagaaattcttccagttctttggcaatactttatccggttttcagcagccttttgcagctgcgttgttcagcctttcttcccaccatccgtttgcagttccagcagaatacgaaggcgtttttccgaaagggaataaagctattcgtcagtgcatcggatacacggatcatgctttgaagttgttctttgaaaaggtttcgaaagaaccgtggtataaaaatacgctgttcgtatttacagcagatcataccaactcgccggaacgtccggagtatgagacggaaagcgggttgttctctgttcctgtagtgttttatcagccgggaagtaatttgaaaggtttccgtaaagatgtgatagcacaacaaattgatattatgcctactgtattggggtatttagggtatgacaaaccatttgtttcctttgggtgtgatttattgaatacgcctgctgaggatacgtatgccgtaaattatatcaatggaatatatcaattctttaaaggtgactatttattgcagtttgatggccggaacgctgtagccatgtatgcgtttaaaacggataagttgctggaacataatcttctgggtcagattgatgtgcaacagtcgatggaagatgaactgaaagcaatcattcagcagtacatgatacgaatgaataacgacgaacttgttgtgaaatgaaagaatcagtgcgcatatttcgctttatagtaatcggaacgatgaatgctttgatcatggcccttgttgtgtggctgatgatgagagaaatgtcattcgaaggtgactatatggtggctaatgtaactgcgtatattatagcccagattcataactttatctggtgcaagtattggatattccccgtagaaaaaagaaagaacaatgtctggaaacagatactattcttctgttctgctttcggggttgcttacactgcgcagtttttattccttattttgttggtagaaggtctggatgtcaatgaatatctggcccagttccttggattgtttatttacggagctgccaactttattgctaataagaagattactttccaataaaaaaaggatataatacggaggtccacaagagaaaagcctgaatagcaactcttgtggaccttttgtattatttctatcggtgatcaattgtgattcgctcgctaatccaaaaaacgtttggtgagtccgtcatattcatcaattcgacggtcacggagaaagggccaccagcggcggacgttctccgaacgttccatgtctatttcaactaccatgttttcaggatgatcgttgcttgcctgtgccaaaaactctccttgcggtccggctacgaaactatttccccaaaactgtatgccgttcgtttgaccggaagggtcgggctcgtgccctacacggttgacagagataaccggaagaccgtttgccactgcatgagcacgttgggagattatccacgcattgagctggcgggctttttcgtcgtccgtatcgctgctttcccagccgatggcggtaggataaattagaagttcagcccctttcagagccatcagacgggcagcttccgggtaccattgatcccagcataccagtactcccagtttgcctaaggatgtctgaatcggttcgaaaccgatatctccgggggtgaaataaaacttttcgtaataggcaggatcatcgggaatgtgcattttccgatattttccggcaatacttccgtcgcggtcgaaaacgacagctgtgttatgatataggcccggtgcgcgtttttcaaagagtgaagcaacaagcactaccttattagccgctgccagttcggagtagaaacctgtagatggtcctgggataggctcggcaaggtcaaacagattcgtattttctgtctggcagaaataaagtgaattgtgcaactcctgcagcacgattagttgtgctccgtgagcagcacaggcttcaatgcttttagcgaggttcatcaggttgacccgaatatctgcggtattggattgttggattaatcctacttttatctttttcatgatgaataattatttaatatgctactgaaatgtccgttattggataacacctgacggatactgcatggtgacgcaatgcagagaaccgtgttgcttgattaatgcccggcaatcaataccgatgacctgatgtttaggaaatgcttgttgcaatacttctcccgctttccggtcattatccggctgttgataggtggggtaaagaattgcatcattcataatcagaaaattggcataggtagcaggcagtcgttcaccgtcttcttctaccttgtctgccattggcaaagccagcaggcgatagggctctcctgccaatgtgcggaatgtttttaattgttcctccatggcatgcagtgcttcataatgttcgtcttcggtattgtcgcatttcacgtaggcaatggtgtcggtggaacagaagcgtgccaaggtgtcgatatgactgtcggtatcatcgccggccagataaccgtgatccagccagaggactttctgcaggtggaaagttgatttgagatattcttctatttctacttgattcagtttcccgttccggtggggggagagcaggcattcggtggtggtaagcagtgtccccataccgtcgctttcgatggaacctccttcgagaacgaagtcaagacagtctatatactggcctttcagcgctccggcttttacagcctgtccggtaatcagattatccagttcggaggcgaacttcaatccccagccgttgaatgtgaagtcgagcagggaagggttgccggtatctatcatggtgatagctccgtggtcgcgtgcccatgtatcgtttgtctcacatctcagaaagcggacattgtccatgtttacggtagccactatctgtttttttacttcttcgggctcgggagtcacgattaataataactcacgtttggctatttctctggctatattgacaaaacattcttgtacttctttcagcatatatgcccaatctgtaccggcatgcggccatgtcaactgtatgccgctttgcagatcccattcggcaggcaggtgaggagctctcatttctacctgtacagtcatattctttccaaagttcaattgcaaatctttttccgagccactggggctgggaagtccaaccatgattcccatcagattatattatatttagttataaaatcagtttataaaatgagcaggtaccagtcttttgacacataccttatgctttggtttcctgtttcggcttccggtcaaagaatggattctttgaagaggcgctcaccggaatagccataaccattttgcagtttttcagccaattgaggcgttgtgctgccaatccggcagagaacatgacacgggtatctacacgcatatcggctgctgtggcacaagcggagccgatggcgatgccaacgtcaatactgttcaatgcacaggggacgtcttccgtgcgtccggcacatgtcgcaaatccgcaatgtccgcaattcaaaccttgtgcctgttcgcgtgttcctatcaatacaacacattcggcactcaagatgttgtcggcatcccgaaggaaaaacttcattccgtgttcttctaccatagctatcattttgtccgacaacagtttaatatcttcatcggtaatcaaggccacttcaatgatatcaatcccttttcctttcggagcagtgcgtgcggcggtcatcatttggcgtgctacctgtaatatatgctcatgacgggcatctctttcgttcagtatcataacttttctcgaattaattagtgaggcaaagataacgtttttcaagaaaatactacctttgccggaaagaaagaattgaaaacgccatgctacatatcaacaatgcttgtatcgcttttgggacagaagtacttttttccggattaaatctgaatctggagagggggaaaaccgcctgtattgtagggcagtccggctgtggaaagacctcattgctaaatgcggtgatgggctttgtgccgttaaaggaggggaccataaaagtaggagataccttgttggataaatcaactatagatataatccggcggcaaattgcatggattccacaagaactggccttgccttttgaatgggtaaaggaaatggtggctcttccgtttgatctgaaagtaaatcgttccgttcctttttcggaagaaaggctctatgaatattttgatgatctggggctggaacatgatttgtatactaaaagagtgaatgaagtctcaggcggacaacgtcagcgtatcatgctggcagtggctgcgatgctcaacaaacctttgatcattattgatgaaccgacatcagcgttggatgccgggtcaacagacaaagtgctggctttcttcaggcggcaggcagagaaaggggcggctgtgttagctgtatcacatgataaagactttgcttcgggctgtcattatttaatagaactataaacgatatttaatactagcataaagggaatttattttgggaaccatcgatatttcatattataatttatttattggcttgctattgcttgccattccgttcttttatctttggaagttcaagacgggtttgctgaaacctgccgtgataggtacgcttcgaatgattatccagctattttttatcggtatatatctgaagtatcttttcttgtggaataatccctggattaatttcctttgggtgattatcatgatatttgttgccggacaaacagcgttggtacgtactcaactgaaacggagcatcttgctgataccgatttctataggttttttgtgcagtgtagtagtggttggattgtactttatcggtgttgtcctccagttagataacattttcagtgctcagtattttattccaatattcggcattttaatggggaatatgctttcaagtaatgtgattgcattgaatacttattatagcggactgaagcgggaacaacaattataccgttatttattaggaaatggagctacacgccaggaagctcaggcaccatttataaaacaggccatcatcaagtcattcagtcctttgattgcgaatattgcagtgatgggattggtggctctgccgggtacgatgatcggacaaattttgggaggaagcagtccgaatgtggcaatcaaatatcagatgatgattatggttattaccttcacggcttccatgctgtcactgatgattactatttcactggcttcccgaagatcatttgatgcatacgggaagttattggaagtaacgaaagaaacgaagaaatgactgttaccgaccggatattccaaaatgtggcggaactgtctgtcccgaattttttcattactgtagagttctcagtaatgggaaatgaaatgccggaacatatcgaatctttcgttttggaaaaatatcaagctattcttcatggcgcaaacggacgcaaatttgtctatacagaaggagggtggcgtctttttttcactttctttcctacagacaaagtggtagatgaacggtatgcactaaagaataaggtgcagatgaagtttcacaaataaatatttcttccattcaggaaagagatccggtgagttattgcatagcttgcagtttctccctcatacagcgaagctgaacgaattgttctcctgtttgtatatacccgccttccaacattcgttttgaaatttggaatttatcaagatgatggagtatgtacttttccacacctgatgattgctttttggtgaaagacaggaagtcaacctttccattttcgtgaataaatactttcgctttaatcgtacggagccccgaatctttgcaatgtttggcttctgctttatctatccaaaagatagctgtagcttttacggtatctaccatacaagtttctgtattatcaacgctcatgttttcatcgattgactcatcggaattctgattctgtttcatttggcaggaaacagccagaataattactaaacagcaggatagaattgttttcatcgtgttctaattttaaggatatgcgacaaatttactaaaaaaacgataagatgggagcttattcctattttatttgctatatttgcaaccaaattttctctaaataatgaaaattaaggaaatagtaagcgcccttgaacgattcgcgcctctgccattgcaagacggttttgataatgccggcctgcaaatcggattgacagatgcggaagcaacaggggctttgttgtgtcttgacgttactgaagctatcctggatgaagctatcgcgttggggtataacctcgtcatatcgcatcatcctttgatatttaaaggttataaatccattactggcaaagattatgtggaacgctgtatgctgaaagcaataaaaaatgatattgtgatctattcagcacacactaatcttgataatgcacagggaggggtaaattataagatagccgaaaaaatcggattgaaacatctgaaagtgcttgaaccaaaagaaaatagcctgatgaagctggtgacttttgtccccattgctcaggcggatattgtaaggaacgcactttttgctgccggttgcggtaatattggtaactatgattcatgtagttacaatctggaaggggaagggacattccgtgccaaagaaggaacacatcctttttgtggagcgattggagaacttcatcgggaaggagaggtgagaattgaaacaattcttcctgcattcaaaaagtcggaagcagtcagagcactattgtctgttcatccttatgaagaacctgcattcgacttgtatccgctgcaaaatgaatgggcacaggcaggatcgggaatcgttggcgaactggaagagccggaaacggagatggaattcttgaaacgtataaagaaaacgtttgaagtagagtgtctgcgtcataacaaactgaccgggagagaaatacagaaagtggcattgtgcggaggtgccggagcatttttgcttccgcaggcaatccggtcgggagccgatgtttttattacaggtgagattaagtatcatgattattttggtcacgaaggagatatcctgatggcagaaatcggtcattacgaaagcgaacaatatacaaaagaaattttttattccataatccgggatttatttcctaattttgcgctccaattgagtaaaataaatacgaatcccataaaatatttgtaagtaaaatggctagagaagcaaaaaaagatccgaatgagttgacggtggaacagaagttgaaaacactgttccagctgcaaactatgttgtctaagattgatgaaatcaagacattgagaggtgaacttccattggaagtgcaggaccttgaagatgaaatcgctggtttgagtacccgtatcgacaagatcaaagctgaagtggatgaactgaaatctgctattgcaggtaagagagtagaaattgaaacggcaaaagcttcagtagaaaaatataagtcacaacaagacaatgtccgcaataaccgtgaatatgatttcttgacgaaggaaattgaattccagagcctggaaatcgaactttgcgaaaaaagaatcaaagaattcagtgcggacagagaagaaaaagaagctgaagtagtaaagaatgaacaaatactcagcgaaagacaaaaagacctcgaacagaagaagggcgaactagatgaaattatctctgaaactaaacaggaagaagagaagctaagagataaagccaaagatctggaaactaagattgaaccgcgtttgttgcagtcattcaaacgtatccgtaagaactcccgcaatggattgggcgttgtatatgtacaacgtgacgcgtgcggtggttgctttaacaagattccgcctcagagacagttggacatccgttcccgtaagaaagtgatcgtttgcgaatattgcggacgtattatgatcgacccggaattggctggtgtacaaattgagcataaagtagaggaagctccggctactactaccaaaagagcaatcagaagaaaaactgctgaataagataccatatttgaatatgtattcgaaagcctcgcattattgcggggctttttttatttcttctaactttactatccctttaaacaaacctaaccttgaattgttatcttttcatttcataaaaacctaaaccgaatatgaatgtacgagcgtggagcgtatcgctccttttgtttctttcaactgtaactgcggttggacagacagtgaaccgctatttgaatactcctcttcctaaagaatgggaagagagtggagaagtgtttcaacagactcttccggtggacgaccactggtggaagtcttttcaggacaccaaactggactctttgattgctttggcagtagatcgcaattattccgtagcgatggcaattaatcgtatagctgctgcacgtgccaatctttgggcagaacgtggaaatttctttccatctatcggactgaatgccggatggacccgacaggaaaccagtggaaataccagtaccttacctcagtctacagatcattattacgatgctgcactcagtatgagttgggaaatcgatgtcttcggcagtatccgtaaacgggtaaaggcgcagaaagaaaactttgccgccagcaaagaggaatatgcggcggttatggtttctctggcatcagaggtagcctcagcttatattaacctgcgggaattgcagcaggaacttgaagtggtaaataagaatgtagcttctcaggaagaagttttgaaaatcacggaagtacggtataataccggacttgttgccaagttggatgtggcacaggccaaatccgttttatacagtactaaagcctctataccacaattagaggcaggtatcaatcaatatattacgacactggctgttttgctgggtatgtatccgcaagaaatacgtcctgtattggaaactactggaacattacctgattatatggaaccgatcggagtaggtatgccggttgatttattactgagaagaccagacgtacgaagtgcggagagaagtgtgaatgcccaagctgcattacttggcgcttccaagtccgattggctgccgaagatctttctgaaaggttcgtttggctatgcagcccgtgatttgaatgatctggtgaaaagtaaaagtatgacctatgagattgctccgtcattgagttggactatttttagtggaggacaattagtgaatgcaacaagactggctaaggcacagttggatgaatctatcaatcaatttaatcagacagttctgactgcggtacaggaaacggataacgccatgaactcctaccggaactcgatcaagcagattgtagctttgagggaagtgcgtaatcaaggtgttgaaactctgaaactttcactggaactttataaacaagggctttctccttttcagaatgtgcttgatgcacaacggtctttgttatcttatgagaatcaactggtacaggcgcagggtagctcgttactgcaactgataagtctttataaagcgctgggaggcggttggagagaataaaagaatctataaataaaatataacctaacggatatgaaaaaactaatgtatatttttcttgtgttgtcggtattgactggttgcaaggagaaaaaagacgccggagcaatgaagggaatgccgactctggcaattagcgtagcgaaacctatagtgaaggacatcactttgacgaaagattatccgggctatctgacaacggaaaaaactgtaaatcttgtggccagagtgaacggaacattacagtctgtctcttacgcaccgggtggacgggtaaaaaaagggcagttgctgtttgtaatagaacctaccttatataatgataaggtggcacaagcggaagctgaactgaaaactgctcaggcacaattggaatatgcccgtaataattatagccgtatgaaggaggctgtgaaaagtgatgctgtgagtcagatacaggtgttgcagtcggaatcgtctgtgacagaaggagtagcagctgtcagcaatgcggaagctgctttgagtacagcgcgtacaaatttaggatattgttatgttcgtgccccttttgacgggacaatcagcaagtcgacagtggatgtcggcagttatgtcggcggttctttgcagccggttacgctggctaccatttataaggacgatcagatgtatgcgtattttaatgttgctgataatcaatggctggagatgtcgatgaacaatcagcagccaacgaaggagcttccgaaaaagatcatggttcagcttgggaaagaaggtaccgaatcctatccggcaacactggattatctgtcaccgaacgtagacctgaatacaggaactctgatggtacgtgccaattttgataatccgcagggagtactgaagagtggattgtacgtcagcattaccttaccttatggagaggccgatcatgcaattcttgtgaaagaggcttccatcggaaccgatcagctcggtaaattcctgtatgccgtcaatgattcggacatagtacactatcggcatattgaaataggacaactgattaatgataccttacggcaggtgttgggaggactttcaccacagcaacgatacgttaccgaagctctgatgaaggtcagagatggaatgaagataaagccgataccctgatgcggtcggcttgttggttatcttcagacgatgcaggaaactgtttgtccttatataaatattaatcgtaaacttatatattatgttttctaagtttttcattaaccgaccaatttttgctaccgtacttgccctgctcattgtggtagccggtttggtcgcactcaatatattgcccgtggcgcaatttccggagattacacctccgacggttcaggtatcggctgtctatcccggtgcgaatgccgaaactgtagcccaaacggtaggactccccatcgagcagcaggtaaatggggtggacggtatgctctatatgtcttcaaattcttcctcttcgggagcatattcgctgacaattacatttgccgtcggtacagatatcgatatggctaccgtacaagtacagaacagggtaagtgttgcgcaatcatccttgccggaaccggtagtggtgcagggggtaactgtgcagaaacagtcttcgaacattgtcatgttcctgacaatgacttcgaaagactccgtctacaacagtctctatctgactaactatgccaaattgaatttggtcgatcagttatcacgtgtgcctggcgtaggagctgttaatgttatgggagcaggtgattattccatgcgtatctggctggatcctgaagccatgcgcatccggaatatttctccggcgcaagtatatcagtccattcagtctcagaatatggaagtgtccgccggctatatcggtcaaccgatcggacaggacaataaaaatgcctttcaatatacacttaatgtacaggggcgacttacttctccggagcaattcgggaatattatcattcgtcgggaacaggatggggcaatgcttcgcctgaaagatattgcgcgaatagatttggggtctgcttcttatagtgtagtatcacgattgaaggggatgcctaccgcagcgattgctatctatcagcagccgggctccaattcgctggacgtttcaaaaggagtgaaggctaagatggaggaactggcgaccagttttcctacaggagtagcctataacgtaactttggatacaacggatgtaattcatgcttctattgatgaagtaatggtgacattttttgagacaacgctgctggtagtactggttattttcctgtttttgcagaactggagagcggttattattccttgtatcacaattcctgtatcgctgatcggtacattggcagttatggcggcatttggtttttcgatcaatacgctgactctgttcggattgattctggcagttgccattgtagtggatgatgctattgtggtggttgagaatgcttcaagattgctggagaccggacaatattcaactcgtgaagcagtcacaaaagctatgggggaaattacggggccgattgtcggagtggtgcttgttttgcttgccgtgtttattccgacgatgatgatcagcggtatttcggggcagttgtataagcagtttgcactgacaattgctgcttctaccgtattaagcggttttaactcactgacactgacgcctgctctttgtgctctattcctcgaaaagagcaaaccgtctaacttctttatatacaaaggatttaataaagcgtatgataagacacagggagtctacgatagtacggtgaaatggttgcttcaacgtccgcttatctcttttgtatcttttgctattctgacagtgattgccataatactctttatgcgttggccgtcgacatttattccggatgaagatgatggttattttattgctgttgttcagcttcctccggcagccagcttggaacgtacacaagctgtcggggataaaatcaatgctattttggattcttatccggaagtggagaattacattggaatcactggtttctccgtgatgggcggaggtgagcaaagtaactccgcgacctattttgttgtcctgaaaaactgggacgaaaggaaagggaaggagcatacggctgctgccgttgtcgaccgttttaatggcgaagcgtatatggagatacaggcaggacaagcatttgctatggttcctccggctattccaggattgggtgcttccggtggcttgcaacttcaattggaagaccggaggaatctgggaccgacagaaatgcagcaggctattgacgcattgcttgcttcttctcattccaaaccggccttagcttctgtatccagtcagtatcaggcaaatgtccctcaatattttctgaatatcgatcgtgataaggtgcaatttatgggcattgctctgaatgatgtattttctacattaagctattatatgggggcggcatacgttaatgatttcgttgaattcggtcatatttatcaggtgaagatcgaagcgcgtgatcaggcacaacgcgtcattgatgatgtcttaaaactcagtgtggctaattcggcaggagagatggtccccctttcttcttttaccaaagtggaagagcagttgggacaggatcagatcaatcgttacaatatgtattcaacagctgccttgacttgtaatgtagcgcccggaagcagttccggacaggctattcaagaaatggaaactttgtttaaagaacagctgggagatgaatttggctatgaatggacgtcagttgcctatcaggaaacacaggcgggaaatacgaccaccattgttctggtcatggccttgattgtagcattccttgttttggctgcgcaatatgaaagctggaccagtccggtggctgccgtgataggtttgccggtggccttgttgggagcaatgataggatgtatgataatgggaactccggtcagcgtatatacacaaattggtattatcctgcttgttgcactttcggcaaagaatggtattctgattgtagagtttgcccgtgatttccgtgctgaaggaaactcaattcgtgaggctgcatacgaagcaggacatgtccgcttacgtccgatcttgatgacttcttttgcttttgtattgggagtaatgcctttgctgtttgctactggggctggtgcgcagagccgtatagcgttgggtactgcggttgttttcggtatggcgatgaatactttattagcgacagtctatattcctaatttctatgaattgatgcagaaactgcaagagaagtttagcaggaagaaaaatgatgatgtgaaaaaaaatacggatatgtaaaaatagaatatcgattgaaaagctttcggagacaagaaaaagatggtgtcactatgtgcttgggatacttacactatgtgtgtggtatagtgtaagtatcctgaccttatagtgacactatctttatagcgcgttataatcgggaatatcctgaagaaaggtatagctctgatgggcgtaatccatccggcaacaataatgctgcattccattacttactatcagatagtcaactttcaataccatattatagcgggttatctgatcgaataccgcttgtgtgatctcgatgtgcggagctttgtattctacgatcattcgtgctgaaaggtctctccggtaaagtactgtatcacatcttttagttgtgccgttcagcttaaccattacttcgttagcaaggagtgcgttcggatatcctttgtgcgcaataagaaagtgaacaaagtgttgccgtacccattcttccggggtaagtgcgacatatcgtttgcgaatcacgtcgaaaattacattttttccgtttcgtacgtttattttagtgtcgaatactggtaggtttaacgataacatttattatttttgtaagttaaataacggtttccattattggaaccacaaatttaatagataattatgaaaacgaaagaagaaatcgtagctaattggctgccccgttacacaaaacgtaacctggaagattttggagagtatattctgttgactaacttcaacaagtacgtagagattttcgcaaatcagtttgatgttcctattttgggtagagatgccaatatgatttccgctacagccgaaggcattacaatgatcaatttcggtatgggaagccctaatgccgctattatcatggatttattaggagctattcatccgaaagcctgcttatttttaggtaaatgtggtggtatcgacaagaaaaatcaaattggcgatttaatccttcctattgccgctattcgtggtgaaggaacatccaatgattattttccacctgaagttcccgctttgcctgcatttatgttgcagcgtgctgtttcttcgtccattcgtgactatggccgtgattattggacgggtactgtctataccaccaatcgccgtatttgggagcatgacgaagcattcaaggagtatctgaaaaagacacgtgcgatggcggttgatatggaaacggccactttgttcagctgtggctttgccaatcatattccgacaggagcattgttattggtatctgaccagcctatgactccggatggagtgaaaactgataaaagcgataatctggttaccaagaactatgtagaagagcatgttgagattggtatcgcttctctgcgtatgattattgatgcaaagaaaactgtaaaacacttgaaattcgactggtaactgccggtctttctaaaaaatatatatggcaaaacaagagctgacctgtgatgacatcctcaaagaactgagggcaaagcagtatcgtcccatctactatttgatgggagaagaatcgtattatatcgatttgattgccgattacattactgataatgtcttgaacgaaacggaaaaagagttcaacctgactgtagtgtacggtgctgatgtggatgtagcgacaatcataaatgctgccaaacgctatcctatgatgtccgaacaccaagtggtggtagtcaaagaagcgcaagcggtccggaacatcgaagaattatcgtactatcttcagaaaccgcttcattccactattttggtgatatgccataagcatggaacattggatcgtaggaaaaagttggcagctgaagtagaaaagactggtgttttgttcgagtctaagaagataaaagatgcccagcttccggcctttattgcttcctacatgaagagaaaaggaatagatatggaacctaaggcaacagctatgctggctgattttgtcggctcggatttaagtcgtttgacaggtgaattagaaaagctgattatcactttgcctacgggacagaaacgtgtaactcccgaacaaattgagaagaacataggcataagcaaagattataataactttgaattgcggagtgctctggttgaaaaagatattctgaaagcaaataaaataataaaatactttgaggaaaatcccaaaacgaatccaattcaaatgacattgtctttgttattcagcttttattcaaacttgatgttagcatattatgcgcctgataaatcggagcagggtattgctaatatgctagggctaagaactacttggcaagctcgggattactcaattgcgatgcgcaaatatagtggagtaaagacaatgcagattgttggtgaaatacgatatgccgatgcaaaatcaaaaggagtgaaaaatagttcaatgtctgacggagatattcttcgtgaattagtgtttaaaattttgcattaggaaaactgaatactctaaataaacaaaaggcatatacttttactgtaaaacagattaagtatatgccttctttatatactgcaaattagttgtgtcagactcataaccaaatcttcttttatagacgaatattttacaatggatctgttgttctctttttcctgacttttatgaatggaaaggaatttgaagatcttttgcttctcttctttaagttcaattttggtaatttctctcttttctagtttttgaggttatgttatattcattttcaaaattgaaaaaatctgatttaattcagactataaatatagaatggcaaatcgtattagcataaatggttttgcataaattggaaggatcatctttcttttcctgaattgataaaatgtcattttgataatttgtgggataattgggatattttgctgtcatttttctagttgatcttaatttgggtattgataaaataggtgtaatttattataatacaggtgtttaattcaattttagagcttctagaattgaaaaaaaacaattgatcgactgaatgtgcggaaatatggcaaggatttacgatttgcgaggtacttcagaagaaaatgtaaaagaagatttgaagagttctcaatatacataagtaaataatgcattttattccttgatttattgtttttgcaactattgatatttacgtttgtgtaatcatgcctgtttgtttgtgaagtttatatctgtgaatagattacaaatgtgatcaatccagctgaatcacaaaagtatactgattgttttacagtagtaatatgcagtttataaatgtaataggagagtggttaacaatttgttttttatatgttatatcattgtataccatataaatatactctaatattgaattatagctctaaaattactgtttgagtgaagcatatttttgtgaatattgtatttacttatttcttatccgtatatataatgttgtaaatcaatataatatattgttttgttaaatctaaaatatcattgtaatttatgttttattttgtgttttacaaacgtattagtctaattgtgataatgatcacacatttgtaatattgttatttttatacttgtaatttgcatttgtgatttgtaatgtttacttttgtatatccgtagtggttattagtatttttgtgaaaccaacgtttaatacatacaattgtaacaagaaagaagctgtatggagataaaagacagaattagaatgataatggagagagaaaaagttcctccaagagtttttgctgagacaattggagtccagcaatctactctctcgcatattttgaatgatcggaataaaccaagcttggaggttgtaatgaaggtacatcagacctataattatgtaaatcttgaatggttgctttatggtaaaggcgaaatgatagcatctgcagaagatgcttctgcagtttcttccaatggagattatcagccttctttgtttgatgagaatcctgtaaatccgtccaaagagacgattaatccggaaaatcgcaaggaaatggcattaagaacagccgaaaatgcacctaaagagattgtaaaacaggagattaggtacatagaaaagcctgccagaaaaatcactgaaataagaatattctttgatgataatacttatgaaacctttcgacctgaaaaatgagaggtaaaatcggtggtttgagcaaattcctgtatctttgcaccggaatacgaatttatacttttatatccatacatgaagaaatttattttagatctgacagttactgagaatatcagattgaatgcaaactatgtattgctgaaattgacatctcagtcattgctgcccgagatgttgccggggcagtttgccgaacttcgggtggacggttcatctactacatttttacgccgtcctatttctattaattttgtagacaagcgacaaaacgaagtgtggttccttattcagttgattggagacggaacaagacgtttagcagaagtaaattcgggcgatgtgatcaacgtagtacttcctttggggaatggctatacaatgcctcaaaagccttctgataagcttttgcttgtgggcggaggtgtcggaacagcccctatgttatatttaggtgaacaattggcgaaaaatggtcataaacctaccttccttttaggggctcgtagcaataaagacttgttgcagctggaagaatttgctaaatatggagaggtatatactactacagaagacggaagtcacggagaaaaaggatacgtcacccagcattctatattaaatcaggtacattttgagcagatttatacttgtggtcctaaaccgatgatgatggctgtggcaaaatatgccaaaagtaatcagatagaatgtgaagtttctttggaaaatacaatggcttgtggaattggagcatgtctctgttgtgtggaaaatacgacagaaggacatttgtgtgtatgtaaagaaggtcctgtttttaatataaataaactactatggcagatttaagtgtaaacattggtgaattgcagatgaagaacccggtgatgactgcatctggtacatttggatatggtgaagagttctcggatttcattgatatagcgcgaataggcggtattattgtaaaaggaactactcttcacaaacgtgaaggtaacccatatcctcgtatggcagagactccttccggtatgttaaacgctgtaggacttcaaaataagggagttgattactttgtggaacagatatatcctcgtataagagacattcaaacgaatatgattgtaaacgtgtcagggtctgctattgaggattatgtgaaaactgcagagatcattaatgaacttgacaaaattcctgctatagaactaaatatctcgtgccctaatgtaaagcaaggaggtatggcttttggtgtgtcagcaaaaggtgcttctgaagtagtaaaagcggtacgtgcagcttacaaaaagacacttatagttaaactctctccgaacgttactgatatcacagaaattgcccgtgcagcagaagaaagtggtgcggatagtgtatcattaatcaatacattgctgggaatggctattgatgcggaacgtaaacgtcctattctgtcaactgtgacaggaggaatgtccggtgctgctgtgaaaccgattgccttgcgtatggtttggcaagttgcaaaggtggtaaatattcctgtcataggcttgggaggtattatgaactggaaagatgctgttgagttcatgcttgccggtgcttctgcgatccagattggtacggcaaattttatagatccggctgttacaattaaagttgaagatggtataaataattacttggaaagacacggatgtaagtcagtaaaagaaattattggtgcgcttgaggtataattgaaaacatacaataacccttcgcatataatacgaaagaaaaatgctattttactttttaagtatattgaataaaatcagtaccggaatgatagatgaaaagagattcccagtgcgaagagtaaaataacagatttgtctttcttatagaacataaataaaaacgacggtgaaaattctcatatttttcaccgtcgtttttatttacatatatttttagtcttccagtaagtcagggcgaagttttttggttcgttctaaagattgctgtagctcccattcttttatttttgcttcatgcccggataacaaaatatcgggtactttccagcctttatagtcggcaggacgagtatatacaggtgccgccaacagattatcctgaaaagaatcagaaagtgccgactgttcatctgaaatcactccggggatgatacggacaattgcgtccgccatgactgctgctgccagttcgcctcctgtcagcacataatctccgatactgatttctttggtgatcaggtgttcacggatacgataatcaatacctttgaaatgtccgcaaaggataatcaggttttgggccaaagaaaggctgttggccattggctgattgaactgttctccgtcgggggtcgtaaaaatcacttcatcatagtcgcgttcagccttcagagcgttaatgcagcgttcgataggctctatcttcatgaccatgccggcgaatccgccaaaaggataatcatcgacacgacgatatttgtcttcggtataatcgcgcagattgtggatatgtatttctgcaagtcccttatcctgagctcgtttcatgatggaacaattgaagaagccttcaatcatctcgggtaaaactgttataatgtcaatacgcataatctttataatttttcgcaaaagtacaaatattcaaagataaacctgtatttttgccttaaacaatcgaagaaatatggatataaaggaaaaaatagaggaattgcgtgctgaacttcatcggcataactataattattacgttttgaatgctcccgaaatttcagataaggagtttgatgataagatgcgtgaactccaggatctggagctggcacatccggaatataaagatgaaaattcgcccactatgcgtgtcggcagtgacattagcaagaatttcacgcaggttgcgcataaataccctatgttgtctttggcaaatacatactctgaaagcgaagttacagatttttatgagcgtgtacgaaaagcgttgaatgaggattttgagatttgctgtgagatgaaatatgatggtacttccatttctctgacctacgaagatggaaaactggttcgtgccgttacacgcggagatggagaaaagggcgatgatgtgacagataatgtaaagacaatccgttctattccacttgtgctccatggtgacaattatccttcttcttttgagattcgtggggaaattcttatgccctgggaagtatttgaggagttgaaccgcgaaaaagaagcacgtgaggagccgcttttcgctaatccgagaaatgcagcctcaggaacattgaagcttcagaattcttctattgtagcttctcgcaagctggatgcgtatttatattatcttttgggagataatctgccttgtgacggacattatgaaaatcttcaggaagccgcaaaatggggatttaaaatctctgatttgacgcgtaaatgccagacgttggaagaggtttttgaatttatcaatcattgggatgtagaacgaaagaatctgcctgtagctactgatggaatcgtcttgaaggtaaatagtctgagacaacaaaagaatcttggttttacggcgaaatcacccagatgggcaattgcctataaatttcaggcagaacgtgcattgacacgattgaatatggtaacttatcaggtaggcagaacaggcgctgtaactcctgttgccaacttagatgctgttcagctatccggaacgattgtcaaacgtgcttcattgcataatgcggatattattgaagggcttgatttgcatatcggagatatggtttatgtagaaaaaggtggcgagatcattcctaaaattacaggagtggataaagatgcccgtagctttatgcttggtgagaaggtcaggtttattaccaattgccccgaatgtggcagcaaattaattagatatgaaggcgaagctgcccattattgtcctaatgaaactgcatgtccccctcagattaaaggtagaatagagcattttattagtcggaaagccatgaatattgatgggttgggtcctgaaacggtggatatgttctatcgtttaggattgattcataatacggcggatttgtatgaattgaaagccgatgatatcaaagggttggatcgtatgggagaaaaatctgctgagaatattattacggggattgagcagagtaagacagttccttttgaacgcgtcatctttgctttgggaattcggtttgttggcgagacggtagcaaagaaaatagccaagtcgttcggagacattgacgagctgcaacaggctgaccttgaaaagctgataagtatcgatgaaatcggggaaaaaatagcgcgaagcattcttctgtatttctcaaatgagtctaaccgagagttagttggcaggttaaaagaggctgggttacagctctatcgtacagaagaagatatgagtggatatacggataaattagccggtcagtctattgtgatcagcggcgtatttacgcatcattcacgggacgaatataaagaccttattgagaaaaatggcggtaagaatgtgggaagtatctctgctaagaccagttttatccttgccggtgacaatatggggccagccaaactggaaaaagcaaaaaaacttggagtaaccatactaagcgaggacgaatttctgaaacttatatcgtaagatatgaaaaatattcgtacttttgcgcctaataaaattagagattataattaaaactcatgatacagactaaattgaaaggaatgggggtagcactgattactcctttcaaagaggatgaaagcgttgattatgatgcgttgatgcgtttggtagactatctattgcagaataatgcggatttcttgtgtgtgctggggactacagccgaaacaccgactcttaccgaggaagagaagaaaaccatcaaaaagatggtgattgaccgcgttaacggaagaattcctattttgctgggtgtaggcggtaacaatacacgcgcaatagtagaaacattgaaaaatgacgattttacaggagttgacgctatattgtctgtagtgccatattataataagccatcgcaagagggaatttatcagcattataaagccatatcggaagctacggaacttcctatcgtgctatataatgtgccggggcgtacaggagtaaatatgactgctgagacaaccttgcgcattgcccgtaattttagtaatgtaatcgctattaaagaagcttccggtaatattactcaaatggatgacattatcaagaataaaccggataatttcaatgttatttccggtgatgatggtattacttttccattaataaccttgggagctgttggagtgatctctgtaatcggcaatgctttcccgcgtgaattcagtcgtatgacacgtttggcgcttcaaggtgattttgctaatgcactcactattcatcatcgatttactgagctatttgatcttttgtttgtggatggaaatccggcaggagtaaaatctatgctgaatgcaatggggatgattgaaaataaacttcgattgccgttggttccgactcgaattacgacatttgag
